United States Patent Application Publication US 2025/0195589 A1 - sequence listing, part 10

SEQ ID NO: 19 - DNA, 2406139 bp, Lactobacillus crispatus
  source 1..2406139: mol_type = genomic DNA
ttgttcgacattaataaattttgggaacactttaatgacgagatgcgtgctcgtttcaacgaagttgcctacaatgcatggttcaaaaatactaaacctatttcatataatggaaaaacacatgaattaaaaattttagttcaaaatcctgtttctaaaggttactgggaaaagaatctatcttctcaattgattcaatctgcctacggttatgccgacatcgagatcttacctgtatttaaaatatctgaagatgcggatattacagaaaggatcgtaacacctgcgccaaagcgtgaagcgcaagttcaacagcctaatttgccagaaaaagaattcactaaagacttgaagttaaacgaaaaatacacttttgataacttcgttcaaggtgagggaaacaagttggccgccggtgctgcacttgctgtagccgacagtcctggtagtttttacaatcctttatttatttttggtggcgttggtttaggtaaaacacacctgatgcaagctgttgggcatcaaatgctagcagagcgacctaacgcaaaagttgtctatatacagagtgaaacttttgttaatgacttcattaattccatcaaaaataaaacgcaggacaaattccgcgaaaaatacagaacttgtgacctgcttttagttgatgatattcaattttttgcaaaaaaagaggggattcaagaggaattcttccatacttttgagacactttataacgatcaaaaacagatcgtaatgactagcgatcggttgcctacagaaatcccagatctatcagagcgtttagtttctcgatttacatggggcttgcaagtcgaaattacgcctcccgatttggaaaccagaatcgctattttgcgacgcaaagctgaaacagaaggttggactatcgatgatggtacgcttaactatattgcatctcaagttgatactaatattagagaacttgaaggggctttagttaaagttcaagcttatgccacaattgaaaaagcagatattgacgttaaccttgcgcgtgaagcattagttgacctcaaattagttcaaaaaaatcgtggattacaaatctctaaaatacaggaggttgtcgcaaactatttccaaacttcaactgctgaattaaagggtaaaaagcgtgtacggcagattgtagttcctcggcaaatagcaatgtatctttctcgtgaattaacagatgccagtttgccaaaaattggtcaagaatttgggggaaaagatcataccactgtcatgcatgcttatgataaaatcgacaagcagatgaaacttgattctgatatcaaaactgctgtctttgacctaaagcaaattttggagcactaaaagttatccactgtggaaaaataaacaagttttacacaagtttttaaccgtaacaagtccgttattttaggcttcttatgagttttcaacagaactcacaggccctactactactaattaattatataattactaataaagagaaatcacacagctattcttgggaggaaaaacatgaagtttacaattaatcgcaatctgtttatcgaaaacctcaataatgtaatgcgggccatctcatcaagagctactattccaattcttagtggaattaagttagacttaacagaagataaacttacgctaaccggtagtgatacagatatttcaattgaaattcaaattccagtcaatgatgatttaaatgtggaatctacaggttctattgttttaccagctagattctttagtgaaatcgtaaaaaaattgcctggtaaagacttctcatttgaagtaaaagaaagttttcaaactcagatcatatctgaaaatagtgaatttacaattaatggtttagatgctaataactatccacgtttaccagaaatttcagatgctgcttcattcactatttctggtaaaactttccgtgaaatcattaatgaaacgcaatttgctacttccaatgatcaaacacgagcaattttaactggggtacgtttcttctttagtccagataaaattaaagctgtcgcaactgattcccaccgtttatctcaaagaacaattgctttagaaaacggacctcaagctgaaactgatttgattattcctggtaaaagtttgcaggaattagctagaatcattggtgaagctgatccagaagttaaagtttgcccaggtgataaccaagctttatttgtaattggcaacttgtccttctattcacgtcttttggacggaaattatccagacactgatcgcttgattccgactgaaaagaccactagtgttgaatttgacatttccgaattatctagtgcccttgaacgtgccagtttgttaactcatgctggccgtaacaacgtggttactttgactttagatgtagaaaatcaatcagctaagttatcaggtaaatctgcggaaattggtaatgttgaagaagatgttagcttcagaaatcttgaaggaaacaatttagagatttccttcaaccctgactatatgcgtgatgcgttaagagcttcagtaacagattctgtaattatgagttttactaagccacttcgtccatttatcattaatccagataaagaagacattgaatttgtgcaattaattacgccagttagaacatattaatcaagtacacaatatttaggtcataaaaagtcgtcaaataaggcgactttttattttgcttttaaacgaaaacgcaaaatattggcgtatatttatttttttaccgtgctagtgtgattaggttattttgaaaaaaagctctgaaaaggcttataagagcgatttagtttgttatttgtgttgaaaactaatataattatataggtataaagcgtattgaaggtgagcattattaagtattttaaagttgacggcgatcatattactttggggcaattcctgaaggaagagagcattatttcatcaggtggacaagctaaatggtacttaaaagataatccagtaactttaaatggtgaacttgaagatcgaagaggcaaaaagatgcatgttggtgatcatatagtggttaatggccaagaatatgagtttcggtagggaagtcaatgtatcttgatcattttactgtacagaattttcgtaatttaaaaaagcttgacgtaaattttgattcaaacgtcaatatttttattggcaaaaatgctcagggcaagaccaatttgctagaggcaatctattttttagcattaacacgttcacataggaccaataatgataaagatttaattggtttcggcggtgagtttaccaatttacttgggcatgtacataaaagccaggtggatcttgatttacgtgttttgatcacccaaaaaggtaaaaaagtatggattaatcgagttgagcaggcgaagttgtctaaatacgtaggtcagctgaatgcgattttattttcaccggaagacctcgagttgatcaagggtgcaccagcactgcggcggagatttatggatcaagaatttggtcaaataaatgcagagtatttatacttcgcaagtaagtatcggcaagttttaattcaaaagaataattatctgaagcagctagctaaaggtaaggcaaaggatcaggtctttttagatgtactttcagatcaactagctggtatcgccgctgaagttgtctttcgacgatttaaatttcttaagtatcttagtcactatgctagcgatgcttatgcacatattagtttaggcagtgagcagctttcaattgcttatcatccatcagtggctgacatccaagctgatgacagtacagaagaaatttatcaaaagattttagcaagttatgcacgaaataaggcaagtgaaattcgcaaggggacaactacttctgggccgcaccgtgatgatattgaatttaaacttgatggtcaaaatgcacatctttatgcttcgcaagggcagcagcgttcaattgcacttagcgtcaagctggcggaaattcaattggtgcatcaactaacagatgagtatcctttactcttgctggatgatgtaatgagcgagttagatcatggtcgacaaagtgcgctacttaattatattcatgggaaaacgcaaacctttattactacgactgacttagaggggatttcctgggaaataattaaaaagccgcgtgtgtatcacattcaatcaggcaaaattagtttggagaaggagaattaaatggctgataattcaaaagaaaatcttgaaaaggtcaaaaaatatgaaaaagaggctgacaagtataatgccagtcaaattcaggttcttggcggtctagaagctgtacgtaagcggccaggtatgtatatcggttcgactagttctcagggattgcaccacttagtgtgggaaattattgataacagtattgatgaacgacttgctggttttgcgaccaagattgaagttacgactaacgaagatggtagtgtcaccgttcaagatgatggacgtgggattcctgtagatattcaagaaaaaacaggtcgtcctgcattagagactgtatttactgtacttcacgccggtggtaaattcggcggtggtggatataaggtttctggtggtttgcacggagttggggcttcagtagttaacgctctgtccactaaacttgatgttaccgtaatgcgtgatggcaaaaagtactttatcgatttcgatcatggccgtgttaaggatgagatgaaacaaattggcacggttccacttgatgaacatgggacgattgttcacttctatccagatccagatattttcacagaaactattgtttttgatgacaagatcttgaagaacagaatccgtgaattggcctttttgaacaagggattaactttaacctttactgacaagcgtaaagacactgccgaaacagatgtgtataagtttgaaggtgggattaaggaatacgttgcctttttgaacaagggacaagaagtattatttgatgatccaatttatgttgaaagcacctataatggcattgatgttgaagtggctttgcaatatacaaatggctataagactactttgatgacttttgccaataatattcacacctatgaaggtgggatgcacgaggccggttttaagactgcgttaacacgtgtggttaatgactatgcacataagtctaagatcttgaaagataaggacgataatctttccggtgaagacattcgtgaaggaatgacagctattgtctcagttaagcaccctagtccgcaatttgaaggtcagactaagaccaagttaggtaattcggatgctagaactgctgtagataaggctttttcagaaacctttagtcgtttcttgatggaaaatccttcagttgggcgcaagatcgtagaaaagggtcaattagccgaacgagctagaactgctgccaagcgtgcacgtgaagtaacaagaaagaaatctggtctggaaattgctaatttaccaggtaagttagccgacaatacaagtaacgatccaagtatttcagaactgtttatcgtcgagggtaactcagccggcggttctgctaagcaaggtagatcacgtttaacacaggctattttgccaatcagaggtaagattttaaatgttgaaaaagcttcgatggatcgaatcttggctaaccaagaaattagatctttattcacagctttaggaacaggctttggtgctgactttgacgtttcaaaagcacgttatcacaaattgattatcatgactgatgccgatgtcgatggtgcccacattagaaccttgctgttgaccttgttctataactatatgcgcccaatgatcgacaagggctatgtttatatcgccaagccacctctataccaagttcgtcaggggaaagtggtcagatatcttgatactgacgaagaattgcatgattacttaggtagcttgcaaccaagtcccaagcctactgtgcaacgttacaaggggttaggtgaaatggacccagagcagttgtgggaaactactatgaatccagaaaatagaagactggatcgggtaagtcctgagtatgctaaagatgctgacgcagtctttgagctcttaatgggaaatgaagtttcaccaagacgtgactttattcaaaagaatgctaaatatgttgaaaacttggatgcataggaggattagatggacgagaatcaaactcaagatcatagaattaaaaacgtcgatctaactagcatgatgcgtagttcatttttggattacgcaatgtcagttattgttgcacgtgctttacctgatgttcgtgatggcttaaagcccgtacaacgtcgtattctttacggtatgagcgagttgggggtaacgcctgataaaccatacaagaagagtgccagaattgttggggaagttatgggtaagtttcacccccatggtgattcctcaatctatcttgctatggcacacatggcacaagatttctcataccgttacatgttagtcgatggtcacggtaacttcggttctgtcgatggtgatgagccagccgcaatgcgttataccgaagcaagaatgagtaaaattgctgtggaaatgttgcgcgatatcaacaaaaacaccattgattggcaaagaaactatgatgataccgaaaatgaaccggttgtcttacctgctagaattcctaacttgcttgttaacggtgctaacgggattgccgttgggatgacaacaaatatcccgccacataacttgactgaagttattagtggtttgcacatgttaatgaaaaatcctgatgctacaaccaaggacttgatgaaagttatcccaggtcccgattttccaactggcggaattattatgggacgtggtggtatctaccgtgcttatgagagtggtaagggtaacattgttgttcgcgccaaaaccaatattgagactgaaaagagcggccgcgagcgcataattgtgagcgaaattccatttatggtaaacaaggctgaattggtgaagaaaattgctgatttggctcgagaaaagactatcgatggaattactggtgtgcgtgatgaatcagaccagacagggatgcggattaccattgatattcgccgtgatgctagtgctagcgttgttttgaataatttattcaagcaaactcaaatgcaggctaactttggtatgaatatggtggctattgttgatggtgcgccacactttttaaccttgaagcaaatgctgcaatattacttggatcaccaagaagatgttgtaactcgcagaacaagattcgagttagctaaggcagaggcaagagcccacatccttgaagggttaagaatcgctctggacaatattgatgaaattgtccacattatccgcaatagtcaatcaagtgacattgctaaagcaactttgattagccgctttggccttgatgataagcaatctcaggctatcttagacatgcgtttggttcgcttgactggcttggagcgcgataaggtagaagctgaatacaaggaattacaagctaaaattgctgactacaaagatattttgtctaagcctgagagaattgaccaaattatctatgacgaattgcttgatattcaaaaacgattcggtgataagcgaagaaccgaaattggtgctagcgaagtcgtttcaattgaagatgaagatttgattgaaaagcaaaatattctgttgacggttacccataacggctatattaagagaatgccaattcaggaatttaagactcaaaaccgtggtggtaaaggtatcaagggaatgggtgtacaagatggcgactttattgagcatttgatttactcaagtacgcacgatctgctcttgttctttactaatgctggtaaggtttactccaagaaagcctatgagattcctgaatacggccgcgcagctaaaggattgccagtagtcaacttattgcaattggaaaagggcgaaaaggtccaaactgtaattaatattccggaaggtgctgacgataattacttattctttgttactaagatgggaactgtaaagcgtacacacgttagcgaattttctaatattagaaacagtggtttaattgccttaactttgaaagatggcgatgaattaagcaatgttttgactactgatggtaagcaaaacatcttaatcgggactcacttgggctacgctgttaccttcaatgaaggcgatgttcgggcaatgggtcgaactgctgctggtgttcgcggaattaacttgcgtgagcatgactatgttgttggttcaggtattttaggtgctgatgaccaagtcttggtaatttctgaaaagggttatggtaaacggactccagcttcagaatatccagttaaaggccgtggcggtaaaggtattaagactgccaatattactgagaagaatggtccattagctggtgtaacaatcattaactcaaataatgatgtgatggtaattactactgacggaattatgattcggtttagaattgatgatgtttcgcaaactggccgtagcaccatgggtgttcgcttgattaaagttagcgatgatagtcaggttgcaagtttaaccgttgttccaactgaggaagaacaagatcaaactggtgacgatgacgactcaaaaaatggataattaattaaaaaaacaaaaaatttgaacttttaaaaaaattatcaaacttttttgcgtaataaataatgagcagtaaaaaatctgctaggatcacgtgaaaacagtttggtaattttttatttatatgctaaaattagaaattgcgagtaatattccattactccttgttcttgattttagcaagaaccatatagtccagaaggaggtgcaatagtcatggcaactacaaagtacgaagtaacttacatcatcaagccagatgttgacgaagacaacaagaaggcagttgtagaaaactacgacaaggttatcgctgataacggtggtactatggtagaatccaaagactggggcaagcgtcgtttcgcatatgaaattgataagtatcgtgaaggtacttaccacattatgactttcactgctgacaacgctgacgcagttaacgaatttagccgtttgtcaaagattgacaacgctatcttacgttcaatgaccgttaagttagataagtaattttaatttattatccgttatgtgatttaggaaaggaaggtacatgagtatgattaatagagttgtacttgttggccgtttaacacgtgatcctgaattacgtactactgggagtggaatctcggttgctacgtttactcttgctgttgaccgtcaatttacaaatagccaaggtgagagaggcgcagatttcgtcagctgtgtaatttggagaaagtcagcagaaaacttctgcaactttacttcaaagggttcattagttggaattgatggccgaattcaaaccagaagttatgataataaagatgggcaaagggtatatgtaaccgaagttgttgttgataacttcgcattgctcgaatcacgcaaggatcgtgaagcccgcggtcaaaatggtggttatacaccaaatagtggaaatgctggcagtcaacctgctaacaatttcccaaataatggcggatcacaaggtaattcacagactaataacaatcaaaataattcacaagatccatttagtggctcaggtgatacgattgatatttctgatgacgatctaccattttaaactaaattaaagaaaggattctagaacatggctcaacaaagaagaggcggccgtcgtcgtcgtaaggttgactacatcgcagctaaccacatcgactacgttgactacaaggatgtcgatctgttgaaacgttttatctcagaaagaggtaagattttaccacgtcgtgttactggcactagtgctaagaaccaacgtaaagtagctaatgcaattaagagagctcgtatcatgggcttgttaccattcgttgctgaagactaatttagatcgaaataaaccaaaaggacaggacacaaggttctgtccttttttcgtataataattaaaaaaattctctcttcgtattgtaccctaagtgtataattttttacggtaagttgaataaataattaaaaaagcccaagtcctttgaatttggacttgagctcaaacaaaaagaccagtagtctgatgttaagaacaaaaaacacattagaagctggtcttttatgaattcaattgtaactgaaatcgcaaatattataaagtctgaagataattatattaagcgtgaaagaaaaataatctgtttcttcttaaacctgattaaggaaatcatggccttggctttagctaaagttgatgatgaaatgattaccaaggttaaagcacagggatatcagattgataagaagaatgagcgctcaatcaatatggcttttggcgaagttaggtatgtcagaagaagatatgtctgcccaggcaaacaagcaaggtatcccttggatgaattaataggctttgacaaatacaagcgctacagtattttagcagtcaaaaacatcttagaagtaagcagcgttgccacttatcgcaatactgctctagcagtcaattgcctgtctggctttaatattagccatatgcaggtgggcaatttggtaaaaatggccgggaaaaatattaaagcgggccaagaagcagattcaagatatgatgccgcaggcactaagaaaaaggtcccagttttgtatcttgaaggcgatggcgtggtgatcaaaggcactaaaagccggttggaatttcatcgctatcaggtctgtgaaggcattgtcaatataagcaagaaacgcagaaagcgaatcaatgccaaggaatttgtttctttaagccgacttgatgcgctgaacgaagccaaggagtacctggccaatacttatgatctttctgatactgtaattcttagcaacgccgatggcggtgctggatatgtcaaaacagacttcgatgacattgtagggctatgcaagcgtcatgagcatttcttggatgtctttcacctaaataagaaaatcaaagaaaggctatattttgcgcctgacctgcaaggcaagctgatttctgctttggaatacaaatacagctatgacaaaactatcctaaccactgcagaaagccgactaattgatgaattgaataccgagctcaatcatgattatctggggcgcctaaagaattatattgatcgtcattgggacgatattaagccgtttaagaaacgaaaactgactgtgactaaagccattggctgctgcgagagcaaccaccgcaagtatacctaccgtgttaaggggcaaggcaagaaatggtcaaaatctggagcagaaggcatgcttaggatcttaagctgcatcaagaatcgagagctggaattttggcttagcagcgagtttgaagattcagaaataactgtattgactgaacaggaattaaaagcagcggcccgtgacagcttaaagaagcgtcatgaagttcatttaggcatccagcatggcgcattaaccgcacaggtagctggcaatagttatttaagcaagctaagcagaaatttaagtcatataaatatttaagaaattaaggttagactaatggtttaaaggctaccgcaaaaacattgacacttactattgtacctactgttttcaatcatgagccggaataaggtataattaacactgatatactatatctattaggaaggatcttcatgaaggattttttacgtaagctagaattgcctgaatttattaaggattcacggctgacagcttctataatcattgcactttctctttcattattgggaagcattattgcgatgattatgaatccattgtttggtttggcaatgcttttagtctttattttgaccgttgcctttgccatctatgggacctatattttagcgggtaatgcaaatagctttgcggttaatttgtcttaccggataaagcgtagtgaacaagaagcaatgattaagatgccgttgggaattttgctttatgattcggatcaccaaattcagtgggttaatccatatctgcaattatatttaaagagtacagatttagtggggcacacaattgaatcagttgaccctgatctgaataagctacttaatgaagcaattgaggcaaaaacagcagaaaatcatctggttgattgggatggtcaccgatttgaaatggtggtccaaaataatttaggcgtaatatatttattggatattacgcgctatgccaaaattgaagataaatataaagctgaacgattggcgattggtcaaattttcatcgataattatgatgagctaagtgaagcaatgcatgatcaagaattgaccagcatgagttcatatgtgcaaaatacattgagtgattatgcgaaaaagtttaacgcatatttaaaacggattgatgaagaccatttcttgatcttgatccatatgcaagaattagctgagatggagaaggacaaattctctgttttagataaggtgcgtcaagaaacgagtagaaacaatacgccacttactttatctatgggaattgcttttgggagtgattctttgtctgaaattgccaaccaggctcaatctaacttggattttgccctaggtcgaggtggagaccaggttgtcttacgtcaacccggtaaagacgcccgcttttatggcggtaagtctaatccgatggaaaagcggactagagttagagcaagaatggtttcacaagcaattagtgaactatttaaagatgccgatcaagtttttgttgttggtcatcagcgtcctgacatggattcagtcggtagtgggattggcgtagtaaaattagctcgtcttcacggagttaaagctaattttgttttagatactaataagacaaactatgatgttggtcgcttggtcaccttaatgcaacagaaaaatcaggataaggatatttttattaaccctgatgtagctttagctcaagttactgacaagtcaatgttggtaatggttgatcattcgaagtattcaattacttactcacgggcactttatgatcgtttgaagaatcgaatcatcgttattgatcaccatagacgaggcgaggaattccctgaaaatccaatgttaacctatgttgaaccatatgcttcttcggcttgtgaattggtcactgaaatgattgaatatcagcagccagctaacggtaagcgagttttgaccgatattgaagctacagcaatgttagctgggattgtggtcgactccaaggaattctcgttgagaacaggaactagaaccttcgatgcggctagctacttacgttcaatcggggctgactcagcagttgtaagcatgctcttgaaagaggatattgatagtttcctcgaacggacgcatttagtagccactttgaagatggtgaagccacatatggccgtattatgtggacctgatgataagattatagatccgatcattacagcgcaggcggctgatactgcacttgatttgggaaatgtgggtgctagtttcgcaattacgcggcgcagtgataatacgattggtatttcagctagatcaatgggtaagatcaacgttcaaattattatggaaaaattgggcggtggtggacatctttctaatgcggcaacacagattaaagatgttactattgaagaagcaaaacaaaaattacttgatgcaattgatgaatatgaaaaagaaaatgattagggaggacaaatatgaaagttatttttactcaagatgttagaggtcgaggtaagcgtggacaagttaaggacgtacctgatggctacgcacaaaattacttgattaagcgaggcttggctaaagaagctactaaaggtaacatgaataccttgaagcgtgtagaagctaatgaaaaggctgcttatgaagcagaaaaggccgaagcagaaaagatcaaggcagaacttgaaaaagacgataccgttgttaacttcaaatctaaggctggtactgactcacgtttgtttggttcaatctcaagtaagaagattgtggaaggccttgaaaagcaatacggtatcaaggttgataaacgcaagcttaacttgccagaaccaattaagactttgggctatactaatgttcatgccaaattatttaagggtgttgaagctactattcgcgttcacgttactgaacaagactaataaaaagtggttgtgattgatggataatatcgtttctcaacaaattccgcatgatcgcgatgccgaaagggcagttctgggtgcgatttttatcgatcctgaagcaattgcggatgctagtgcggtagttcagcctgaagatttctatgagcgggctaatcaaattgtctttcaagcgatgttggacttgtctgatcgcggggatgcaattgatacgctgaccttacaggatgaattaaataaaagaaatcagttagaagatattggtggtatcggttatgtttctgaattagcgatggccacaccgacagcagcgcatgttacctattatgccaaaattgtgcataggaaggcgctgcttcgtcgtttaatctctgctagtcagaagattatctctaatgcaatcgatggctctgacgatgtaacagacattctagatgacgctgaaagtgaaattatgaatgtttcgtcagagaatagcacaggcggctttaggaccattaaagagatcgttaattcagcgattaatgatattaataatattccggatgacggaaatatggttactggcttgccgactggttttgcggaattagataagatgacaactggttttcacgatgatgaattgatcattgtagctgctcgtcctggtgtgggtaagacttcatttgccttaaatattgcgcaaaatgtagggctacacactgaaaaaagtgtagctatgttctcactagaaatgagtggagagcaactggttcagaggatgttagcttctgaaggactgattaattcacagcacttgagaactggccagcttgatgaagaagaatggcgtaaattggtagtggcttctgggtcactagcaggtgcgcaaatctttatcgatgatacgcccggaatcaagatgagtgaaattcgtgctaaatcacggcgattagctaaggaaaagggcaatcttggtcttattgtaattgactacttgcagttgattgagggaccacgtagtgagtcacggcaacaagaagtttcagctatttcacgacaattaaaaaagctagctaaggagcttcatgtgcccgtcattgccctttcgcagctatcacggtcagttgagcagagacaggataaacggcctgtactgtccgatattcgtgaatctggatcaattgaacaagatgccgacattgtttctttcttatatcgggatgattattatcgcgatgagcctaaagatggcgaaagtagtggcagtcaagatgaagttggcgcagaagacgataacggtgaagtagaagtcattattgaaaagaaccgttctggtagtcgggggacagttaaattaatgttctctaagccgtttaaccggttttcaaatttggattatgcacatgatcctaatggcaattaagattaatcaagtgtctgggaaaaaactaagtctcagatcatgaaaaaagaacgttgaatttttgtttcaacgctctttttgtatacttttagctccagccttgatattattaaatcatcacaaaataaaaacaaaaaggtggaaactaacatgtacaagaattatatcacaggtcaaactgctttaacacttaatctagattttgccattccggccaatcatttggctaatgtcatcagctggtttgtagattcaattccagaagatgttttagtaggcaagactgctaaaacgggccgcccagcctatcatccagccatgatgctcaaaatactgctttttgcttactccagaagagttttttctggcagaaagattgagttgatgctggaagaaaatctgccaatgatgatcttggctgaccagcaaaagatttcatatcatactatcaataattttagatcaagcagccatgccaatgaactgattaaaaagagctttatctacttcactaacctgttagaagatgaaggcttaatcaatgaaggtgctgcttttatcgatggtactaagattgaagctgatgctaaccgctatacatttgtctggcgcaaagcggttgaaaagtatcatgaaaagctgaaaggccaggcagttgaactttatgatgaattgattactaaagaagtagtcaaagaaatggaaaaagaaaaagttcaaactagtcaggggctaaaggaattagctcaagaaactgaagcagaaattaacaagctgactaaagagattgagcaggaaaacaaagccattcctggcggttcacctcgaaaagccaagcgacgtggactaaaaaagattctgcaccggctaagaaaagattatgtgccaagaatgcaaaaatatgaagaagccgaagagatctttgccggacgcaacagttattccaaaacagatcatgacgccacctttatgcatatgaaggaagaccacatgaaaaatggtcaattaaagcctggctacaatattcaagcagtcacgaccgatcaatatgtagttgattatgccatctttcctaatccgacagatttcaaaactttggagccggttttggatcaaatgaccgtgttggacaagtttgacaaaatcgtcgccgatgctggctatggcagtgaatacaattattcgatgctggaggaaaaatatccagacaagaagtactttattccctacactatgtatgaaaaagaacagaccaaaaagtataagaatgatccaactaagctaatcaactggtactacaatgaaaaagatgattattacattgatcatcatggcgtcagattcaatttcaaatattacagccagcgcaaggatcgttctactggtcaggtccgtgattttaaggtttatgaggcagacgagttccagctaacgccagaattggaacaattggctaaaacagctagcggccgccagcgccaagttcgctataatcctaactggcaatatttaaaagaaaaagcaaaagaagttctccaaagcgaagaaggcagacacatctatggcatgagaaaatatgatgtagagccagttttcggacatttgaagaacgtatttggcatgcgcagaacgcacctgcgaggtaaagagaaggtcgaaaccgatatcggaattgcctttatgatgatgaatttgaacaaatattgtcaaagaaggtggctgaagggccgatttttattgttaaaaattttaaagagaacaaaaaaacgatcaagattcttaaaaaaggaaatcttgatcgtttttattcatctggaagctagttttttcccagacacttttttgtacttaaataaaacacaaacaatatttgcatagtattgtactataatttatattttatattgaaagtacacttaatatttgttataactaatattgaaaagatcaaattacgaatatactactcatggaggaatagcgagtttatgaagtttaagaaaattttgcttggtgcgtgtgcagttttagcagtcgtttcactagctgcctgctcaaatagtaagaagagttcatcctcatcgaatgaacctaaggaattgaacgttgaatttgtaccaagtacccaagcaaataagatggaagctaaggccaagcctttaggcacattattgcaaaagcaattacacattccagttcacgtaaccgtttctaccgactatagtgggctggttgaagcaatgtcatctaagaaagttgacgtaggctttatgccaccatattcttacatattagctcataaaaagggaattgctgatgttttattgcaagccgaacgttacggctatgatgaaccatccggtaagatgaatcataccttaatgcataagtatcgtggtatgatcgtggttaagaagggctcaaagatcaaatcttggaaagacttaaagggtaaaaagattgcgattggcgatcctagttcttcatcgggctatgtttatccagttgcggaactttacaaaaagggtttgaatgtaaccaaggactgcaaattagttaatgttaagggtgacgatcaagaagtgttatccgttttgaatggggatgttgatgccgcattcgtcttctcagatgcacgtaatattgccgctaaggatgacaagaaagcaatgaccgatgttgtgccaatctactttaccaagtggattccaaacgatactattgcggttagaaaagatatgcctaaaaaattcagagttaaattagctaaggctttcaagaatattgctaagtctaagaagggtaagcaaattatcgaaagcatttataaccattatggttacgttgaagctaaggattccgactttgatggcttacgtcaataccaaaagattgtgaacaaggctaccggtggtaataattaagattaaaaaagcactcactaagtgctttttttgtattcatgctaagatcagttaaaataaataaaacactaaaagcaaaaatgaaaagagaagaaaaaatatgaaaattgctgttttaactgatagctcagcttatttaactaaagaacaacaagaaaaatatcaaatcgatgttttgccaattccaattatttggggcaaaaaagtatatcatgacttagtcgatattggttatgaagaattttatcaaaaactaaatacagcaaaagagctgccaactacttcgcagccttcaatcggtgatcttaagcagaagattgatgaatacgtggcagcaggctacacggatgttattgtaattactctttcaagtgggatttctagctatttctcaaccgttcagagtgttgcggcagaagaagaccgaatcaaggttcatccattcgatagtaaaattacctgtgctggtgaggcggattatgctatgttggcaggccgtttaatcgaggctggagcggatattgatttgatcatgcatgatcttaaggacctgcaaaaaacgatggatgtgcgctttatggtggacgatttgagccatttgaagcgtacaggtcgtttgtctaatgcggcaagttttgttgggacgctgtttaagattaagccgattttatcgatggatgtgcaaaatgaaggccatatttcagcgattgcgaaagagcgtcaatataaacgtgcatacaagcatgtgcaaaatgattttgataatttgactaaaaatatgccgtataagattcaggacacaatttttgattcacttgatcctgagaaaaaacaggcctggcttgatgattaccgagctaagttccctaagtataagtttgatactagtattatcggccctgttgttggggtgcatgtaggtcaaggtacaatgtcgatgatctggtgccgtgatttggatacttattttgatgaaaatggtcagccaatcaagggaattgagtcacaagcagtagtggatccagagtaagcataataccgatatggcaaaaaaatgagaggcactattgattctttaatatcattgctatattattattaataatttaatatggcgatgaatagggatgatcagagtgtcaatcagttctttttttaaaaagttaatagccaaaaataaactcttgtttttagctatggtgattactagtgcttttgcttctttagatggcgtcatttctccttatgttattgggaaaattactaatacactttctcagaaacattttagtgagataccgaaaatcttgttactgtatctgttgatgatgctttttctgaatgttagcttttatctatggcaattttgttggggaaaaattaccaaatcaagtaatgaattattgagatctacagcttttaataattttattgcttcccctagtgaaaagaaaatcactaataccctgaattttatcaatgttaatgttaaacaaattgaaaatcaatgtattgattcaacaattatgcttgtttactgcgttgagcaagccatcgtttcattagtttatattttaagtattaatggcattgcagcaatggttttcttagtttgtgggttaattccatcagttattccacgtttaactcgtaattgggttcagacaggaactaaaaagtggaatagcagttatgaaaactataatcaaaaaacaagtgatgctgtgtatggttttgatactatcagacatgcaaatggtgataatagattcaaaatatttgtccaaaaagcattaatgggagaagaaaagaagtattttttgatgaattttcggcgtaatacttctaattttttagcccaggtctcttattcattatcaatggttatttctttggctgttggtacattctttgtaattaatggtcaaattctagtaggtggtttgatttctctatttttagcatcagatcgtttaactagtccaattatttcgattgttaatattgcaaatcaattgacctctgttagtcctctgctaaaaaataaagctttacaaaaatctaaaaagcaagaatttaataatttagacttcaccaaattaccaaaccaagagaaaataatttttgatcactgcaatttagggtattctaataaagctattttgaagaatattaatttgacagtttctaaaggcaataaagtattgatcatcggtcgttctggtattggtaaatccactctgttcaagacattgcttaatgaaattccattgctaaagggcaaaatactggtagataatagtcttaaccaagctaatttctataccaattttggtattgttagtcaggatacttatatattcgctgaatctttgcgctttaatttaacgcttggaaaagattttcctactcagcaagtaataaatgttttgaaaactgttaaattaagttatttagctaatgaaaaaagcttagacatgcagatcggggagaagggattatcactttcgggtggagaaaaacgaaaactggaaattgcacgagctttattgaatcaaaaatcgattttacttgttgacgaaggactatctggacttgatgaagaaagcaataaacaaatttttgcacttcttcaaagtcttccgcagacagtaattgaaattgaacatgctgttagtccagaagagaaaaatcaatttgatcaaattattgatctaggagctcagtattgatttttttataaataaacaaaaacaattacatacgtatgaaagcctttacacataaagacttttttatttataatattagcagcacgaaaactttttggagaaaaacttacatacagaaaaggatgagaatatggcagaaaagaaatatgtcggcagtatcgaagcaggcggtactaaatttatcgtagctgtgcaagatgttgaaacaggtaaggaagtagcgcgtgatcgtattcctaccactactaacaaggagactttacaaaagactgctgaatttttcaaaaagcaccccgttgatgcattaggaattggtacttttggtccaattgatatcaatcctaactctcggacttatggttacattttggacacgcctaagccaggttggtcaggtacagatgtgaagggcttctttgaaagaaaattaggtattccagttgccatgacgactgacgttaacgcatcatgttatggtgaatatgttgctcgcggtcgcgatgattctaagagctacttctatgcaacagttggtactggcgttggagctggaattgtgcaagcgggtaagttgctcggtttgaataaccacccagaaatggggcacatgttggttcgtcgttatcctggtgatgattatgaaggccattgcccattccataatgatgcttgtgttgaaggcatgtctgctggtccaagtcttgagggcagaactggtatccctggtgaaaaattgtctcgcgataacaaggtcttcacttattctgcgtattacattgctcaaatgctcttcaatgtttacatggctgctcgtccagatgtaatgattgttggcggttcagttttaaatgaagatgatttggttaaggtaagaaagttctttgatgaatttaacaacaattacgttgccacacccgatttgaatgaattaattgtgcgtcctgctgtggctcacaacgggtctgcaactcttggcgattttgaattagctaagaatttgctcaaataaaaaagcatagataaattgaataagcaataaaaaggctcaactcgttaagaaagacgtaaggcgagccttttttgacgtaatttgacctaaatgcgcgtaatattaattctagaaacgtaaccggtttattaagaaaggagcccaactatgaacaaatcagatagtggcttaaaagacaaagttatcggtaaagtgaaagaagtcgaaggtaaaattaccggcgataaatcacgcgaagtccaaggaaaagctcaacaagccaagggcaaagttaaggacaaagccaaaaaattaaaggatgatctggaaaaagaccatcaaatagatgaagattgttaaagactcaggtcgactagcaatagctaaacagaaagcaaataggtgatcctatgttatcatggatctgggttttaatcgttggcgctataataggtctaatagctggtttcataaccggcaagggtggatcaatgggatttctagctaatttaatagcagggctggttggttcaaccttaggccaagcaatctttggttcgtgggggccgcaaatggctgggatggcaatcgtaccatcaatattgggagccgtcatcttggtactagtggtttcctttgtactagggatgcttagaaaaactgaataaaaatagaataagagaagtgtctgggaaaaaactaacccttagatactgaaagacgatcaatccaactcttaatttgagttgcttgaccgtctttttctgtctatttttatttttgaacaaagaaaattggtcttttgaccatcttctgttccaatatttgcttaaattcatcatcatgaaggctattcctatatctgtttcaaccttctttttgcctctgaaatgagttcggcgcatgccaaagacgttcttcaaatgtccaaaaatcggctccacatcatatttcctcatgctgtagatgtgtctgccttcaggactttggagaactgctttggctttttcttttaggtattgccagttaggattatagcgaacctgacgttggcgtccgctcttagtcttggctaagcgttctaattctggcgttagttgaaattcatctgcttcatagaccttaaaatcacgaacctgaccagtcgatcgatctttacgttgactataatatttgaagttgaatctgacgccattttgatcaaggtaataatcatctttttcatcatagaaccagttagccagcttagtcggatcgttgcgatgctttctggtcttttccttttcgtacatggtataaggaatatagtacttcttgtctgaatactcttcttctaacattgaataattatattcgctgccataaccagcatcagcgacaatcttgtcaaacttgtctagtgtcgtcatctgctttaaaaatggttcgaaagttctgaaatcagttggattagggtataaagcaaagtcaaccacatattgatcagtggtggcagcttgaatattgtagcctggcttgagctggccgttcttcatgtgatcttccttcatatgcatgaaagtcgcgtcatgatctgtcttagaatagctgttacgccctgcaaagatttctttcgcctcttcatatttcttcattcgaggaacatagtcttttcttagtttatgaagcagctttttaagaccgcgtcttcttgcttttctaggcgaaccgccagggattgctttgggttcttgctcaatttcttcggtcagcttttcaatctcggcttccgtttcttgtgctagctctgccaaaccttgactggtctggactttctcttttgccattgctttgacgacttctttggcaatcaattcatcataaagctcaaccgcttgacctttgagcttgtcatgaaatttttcaactgccttgcgccaaacaaaagtatagcgattggcgtcagcttcgattttagtgccatcaataaagatcgctccttcattgataaggccctcggcttctaacaaattggtaaagtagaggaagcttttcttaaccagctcattggcatgcttgctggatctaaagttattgatagtatggtaagaaatctgttggtgttcagccaaagccatcatcggcacgttttcttccagcattaattcgatttttctgcctgaaaatactcttctggaataagcaaaaagcaagattttaagcatcatcgctggatgataagctggacgaccggttttagcagtattacccaataagacatcttctggaattgaatcgacaaaccagctaatggtattagccaaatgattatgaggaatagcgaagtctaagttgagtgttaaagctgtttgacctatggtataattttgatacattaagattgccttctttctttttgttttgtggtgattcaataatatcaaggaaggcacttaaagtatagaaaaagaacgatgaaatccattaggaaatcatcgttcttttttcctgtctgagaattagttttttcccagacactttgtgtttcatgtgaaactattttagcttttttcgttcattttctttctcagctaaaaaacgttgcttaatttcttcaggcaaaagactagggaccgtcttgtcataaaattcaaagaatatgggtgccttgttagagtcattgctcttgggatataaggcaaagtcactttcgctaaacggtaagctgatattaccacgtaaagcattgataatctcaccgaacatatgcaaaacataacggcgcgtctcaggctctaatgacatgattacgcgactgaaacggacagtgcctaataatttatgggcagtaatttgaaaaatatcggtaatatttaattcatcaaatgcttggaaaagagcatcccataattcaccacgttgcttttcagggatgctgtggttaaagtcgatgaagaaatgccgcaaagaacgtgcacctgaagtaagtccttctgctagaacaaaactatcacggccaacagaccaacggcgtggatcatgttgctggaccatcggtgcagtgcttttgacgattaaaacgtgttcaggatgatcaagcatggtgccaatgattgaagcttctgggaggtaggtcttcatcttgggtaatgcacgtacaaagccaggtgctttccagacttggtggaaaaagccggggccgtcaaagctaaaggccttgataatacggtcctgcaaatcaggctcagcgacacttaaagcatattcagcgtaattgccacctttagagtgacctgctaaatatattttgtcgtgaggaaattccgcagcaatttcttttaaataatgagcagcaacatcttgcccatagactttaggcatgtagttcatgttcatatcttcgttccagccaattaatgaactgtcagtgccacgatagacaataataattttattgtcagttagtcgaaaagtagcagcggtgaattgcaaaggatatgggtctttttctaggcgattagtccagttaagaatcttaactttgcccaagcgaggtgatttgggcaaaagcagaacttgatcaccagctaaatctttcatttgtacctgaaatgaaggtagtactcgcagtttttcagctacttcgcttagggtgtgtcctttggcagatttgtcgacgggcagataaataatggaggcgaagagagagacatccacactattgaaaggacgctctttaaaagaaagatctccacgccaacgtaaatattcaagtgttccggccataatctcgtcctttctttcacttttagcaataatactattctactagattattgtggcaaaataaaaaatctcaggcgaatgcttgagatctaaacagaattttaaataccaccacgcgtatagctgatgcgcgtaatatctggatacttacgtaagttcatgataattgaattttcgtcaagtttattattgataactccatcaatgtagaaaactatccgatcatcacttacgtctaaaattttgatagtaatattttcaactttattttctgcaagttcatgtttaattttagacaaaatgtggtgctggttaatagccacaatttgaatgttaaaacgaacatgtggcgttattttgttgataatgacatcatcgtgaaagatcatttgaatgataaacaatagggcggttgataggataccgatgaaatacatgccagcaccaacagccatcccaatggcggcagttgcccaaactccagcggcagtagttaagcctgagacctgttcttttctaactaggattgtacccgcaccaatgaaggaaattcctgtaacgatctgggccgcaattcttgatggatctagtgcaatgtcatgcatgcttaatagatcggtaaatccatatttagatacgatcatgaataaagcagaagcaatcgcaactacgatatgagttctcacacccgcgctttttctctgaatcgcccgctcatagccgattaatgcgccacaaaaagctgcgacaacaattctaagtagccaatctaattcggttgtaattggagctaaagtttgcattatttagtcctcatcctttgtataatcaacaattattatcatttctattttaacgtaaatgcagaaaaattatagtctggggaatttttttgaacttttttcaaaaaagacttgcacagctctcgtctatgtggtttaattaatactgttgtcgggtgagacaacgaagagttgctgacttagctcagttggcagagcacctcactagtaatgaggaggtcggaggttcgaaccctctagtcagcattagttaaacaatttaatagtttttaagtctatcaattaagttcgaaagagcttgatatgataggcttttttgttgtttctagatatttgtgtagatttaaaaatagttatgaatatttagtttcaccacaaaaattgccacacagtttttctagtgtggcatctgtgtggcaaaggttcgattaatgttgtagtggcgggctttattgcttgccatttttttcgttttcaaagtatccatgatttaagaatgactgtcgatactcttttaagatttttatttgatggtctatggcaggaactaacgtatatgcattatttttattgtagaattcatccattaatttagtattcgattccttgtagtccttaatgaaattactatcattttgattcataataatttcttctaactgcatacgaataactaaattaacattattaatcatttcaagatcattggcaccttccaatgattcttcaaattttttatcaaataaaaatttgaatttatctttccaaaaatttattacgtatgatttctttttataatcttcatcatttttagtaaaagaatcagcggtatctttatctccatttatagaaagaaagtgagaaatattatttttcatattactcaattcttcattattatcataatatgctgaaaaaagtaaattaattaacttactctctacttcttcacctctaattccttcgccttttacataagatactggaactttaaatatttctgctaaagctttccatacctcttcatttggaattctgcttcctgcttcgtatcttgctattgttactcgtgtagctgatatgtttttgttctttaaaagattagatagatcttgttgtgtaaaataatttttttctcttagttctttaattcgatttggagtcatattattacctcactaagattaattttatacgattggtacataattagcaaaagtaccaattttggatacaaaagtgttgactacaagaatgaataattgtatattatatgtaaccaaatgtggtacacaaaattataaataaccatttttggaaacaaaaaagaaagagggaatattaaaaatgtccagtaatgtaacaaagcaaggtgaagtactatctaccttcaacgaaagtagtagtaaaagaaccccaattcaatcagcattaacaagaccgttggttgaagcaattggtaagtgttttctattgttgagcggaaccacagaagaagttcaagatcctaatgatgagtctaaaactattccgcgcgcagtatacgaagtaagagttattagctctaaaactagattacctattggaactgtgctaacggtgaaaattaaaggaggtaagagtgtaattactgatgaagagaataagaagttactgttaggcttagagaaaaataaggtagtagcattcgacgatctaagtcattggaactttaacggaaatgagggattatcagcttcaggtatgcgagtattagaagtcagtccgcaagaggctatgaatttatagaaatgaggcggcttatatgaaaataaaaaaattagtcttagataccaaaaacccgttaggcaatcctaacggggtaaaaatggcattaggagtaactttattatcttcaattggtcttgagtataaagttgcacctcaattcataaatgctggtaattataccgcattagcttatccatttttaattaatattatacctctagggtatccatgctggaaatgggttaatctccatatcgttaattataagatctataagcaattgatgaatattgttcattcggaacaattaatagactatggagataaaaaagaaactaccactttcggtgaaagaaaagttgaatatggtgtcaagatcgtctatgaagaaacggcagaaggtacatatattactgtatatcctaatggtataaaacatagcgacgccactcagacgctaaacaataggctagaggaaactttcaacatgaatgttttatcggtagatcatcagctagcttatacgaaatatttattgagaaatgtaaacagacaaagaatggaggtttctaatgataacttctaatttcgtaataaatcttgataagaatacatcattcagttttaaaggtagtggtgggattcttgtcactgggagaagtggctcaggcaagactaataccaccacatatataatgctgaaggcgatgtcccaatgtgattgcggtttatatattattgatgcaaaaagagctgatatgtatggacttcatcaatttttaaaagatggcaagaaggtagtggcaagtacaacaaatcaaatagcacgattgttgcgtgttcttaatgagaacatgagcgcacggtatgagcattttaagaatggaaaatggggacaggatttcgctgaatatggatatagaccatatttattagtcattgatgaagtatctgcgatgttggctggggctggtaagaataagaaagaaataatgggtgaattgcgtcaagttatccttcgtggacgacaagcagggatatttacccttatttcagggcagagaattgatgcaactattttagatcgtgatattaccttacagttaggtacaagaatcgtgatgggacaagcagattcggagacttatcgcatggcttacccaatggtaaatgatattaaagcattaccattagtacctaataagccggggtatggtcttatctattcagatgggcaaaaaattagcaatcctactccatttgtctcaccggatatgtctaacattgatgttccaggggtaattacgaggttagagaataattttgatccatctaaatatattgatgaatcaagctattgggaggtttagtaattgataagttgccagctggcgggcgacagagtcgcacgaatggaatgtccaagcgtgagcgggctggcaacacccaactaataatatgggtgtaacggaaagattattaatcatggaaacgatgaataatattaaaattgatcaacttcgtctaaatattccatatgatgaaatctatcaagtagaaaatagtcaaagtttacccaaagaagttatagtagctgataatctgctgcatctggcatggttgtttaagtctaatacagtgagtcatggacataatggctatacttcttcatataatttcggttcaggagaacaaggcggaaatatttccgtaatgtggaacgagtcaagaaaagatatgggaatactagtcgactttactgcgacaggcaaagcgctatatgaaagccttgctgaattacatggaattcctgttaattggaagaaaataattgaagaattatatgaaaaaatggggcatatatcgaggctagatatagctactgaccttattaattatggtttttcagttaacgaaattattcaaaggttaaagaatgaagaatcatttttcttgaatactcaaggaaataaaatcaatgctaatcgatttaagataattggaagctatagtgaagctcagactctatatatcggtagtagaaaaagtgatgcttttctgagaatttatgataaaaaagttgaacaggatcgagccgatggactctatagaaacttggctagaaactgtaacgattggataagagtagaagcagaatttaaacaccgtttagctaaagaactaggaaaatatattacaacattaactgcagataatatttatccttatttacttggctgtgtactagaacgttggtcattagttgatagggaagaataatgacatatgaaaaattccaatattctaaagaatggaagattttaaaagagttatcgaaaggacaaggacttcaagaactaaaacaagctcaagttgacgcttccctgaatagaaaaattaattggttcttgtatggtggtgccagtggagttattacgttgattaaagaaatttatggtgatgaagcactaaaaaagttttatcaatttttagattattttatttctaatcctgatacgttaggacattactaccactcggacaagataaaggcggatactaaaactattgcagattctacgcaaggcttgaactttggagaatatttagaagacttaaagagagaattagttgagggagataaacagaaaggcaggggctaatatgtttggcacagagttactcaacgctagacaaatagcagaagaattaggtattagctatacttacttttttaaattaattaaaaatgggtgtccttatcatcaacttggagaccaaggacgtaaatattacgttttaaaggaagtacaagagtggctattagtaagtagccaacattaattagaagacgtagcaacttgctacgcttttttaggagaaagctatgtcaattacacaaattaaaacggggaaaaataaaggaaaataccgtgttagaattcaacctactgataatgaaacaggtaaaactattccgattcctagtaaagtaacaaaaactagcagtaagcgtgaagcaaaacaattagaagaacaaatgtgggtgcaatatcgcgcgcataaagaaatgaatttaaatgtattagatcaaccacttgcaaaagctttagatcactatgtagaagaagaaagaagttcggggcgttggtcatcgattactacgtatgataattggaaatatacggttaagcttgtttctcaatatttcggaaagaaaaaagttaaagatatcaaagaaaaagatatgcgtagttttgctagaaattacataagtacacataaagcaactgtggcacctcattcaacgctagatagacagttacaaaatttaaggagttattttgctactttgaaggaatatggtgtcttaaagaatcctattcctatgaagccattaactaagttttttagacgtgatgaaatgaatgcccctgttaagaaatatgttttcactaataatgaaattaatgttcttaaagatagaatttatagagagcttggagtaacaagaataagttattggacaactagaattgctatcttgatagctctagatactggaatgagacctcaagaaattcaggctttaaagtggagtcaaattactaatgatggaagttttaaagtttttagaataaatgactcatggaatgaaaaagagaagcatcttaacggacatttgaaaagtcgaccgcatggagaatctagactaacccttcccctttctgaaccacttttgcagttattgaataagtttcgtcattgtcagttagaacttttaaaggagaatggtttaactaattttaatgatcgaattttattgaacatcacagattatcacttgtgcgcattagggtatccaataactcaaaaaagtatgaatgatatgttgaaacagttgagtaagaaagtaggggttaataatcaaaatttaaatataagtatgtatacttgtcgtcatactgtagcaacaaaattagggaatacaccaggcatgtcttacccttgggcggcaagcagattagggcattctttaaagatgtttatgcggacatatgtacatgttgatgaagatcgaaatgaagaaatgcttagattgatagctaaaagataaaagaaaaatgcaaaaataacttatatttgataaaaaaatgaattaatgtagtaatagcaagaatttgaaaataataaataacaaataatttttaacattttatagattttgaaaaaaaaagagcgtatactcagggcatcataaagagatgtgaaggagaaatcaaaatggttattgtagaacaaaagtttaataaatataatcatacaagcaacatggatgctatggagtacgctgcaggatgttgcacatgtacaacaacaagttgtacaacttcatgtgccgctgtagctgaaagttaatggatagttggcgctgtaaattatattacagtgctttttttaggagtataaatactgttatgtgtctattaagaataaaagacttaaaagttaattttaaggatcaaacagtactggattttagaggtcatgatatagagataaagtcaggagacaaagtagctctaattggaaaaaatggggcaggaaaaagtacactattaaattgtcttttacatgaagtaaaatacactggctgtataaaggagaagtatcatcagtcggatataggagtagtttttcaagaaaatgtatattttaaattcttgaaagtttatgaaatctttgaattagtgtggaataaacctaaaaagttaattttaaaatctaaatttattaagaattttaatttagcaagcattatgaataaatacatttctgacttatctggtggtgaaaaacagagattaacaatagctttggttttttctcaaaataaaaagatttacttactagatgaaataaattccggcttagattatgataacaggcatgaattaagtaaaatcataaataatattactgaagaaaaaacagtaatacaaataagtcattattttgaagaagttgaaaattgggctaataaattgataatccttgatagaggcaagatgatatattttggaagcttatctaagttttattctataaataagcatgattcattaattattataaatgataaaaaaagcctatctagactgacccaatgtcattaagttaagacattgacaattaatattagacttttaaagcactgatttaacatttaattggttaaattggtgcttttttcgtacaacaaataaggcatagcacagattctgcttttttaagctacgcgatataaataatatacagctgatttgggcttaatatttctcttgtccttgcggcctggtctaattggaatggtataatagctgatctgaataaggatccgttcaaaatcttgcgttaaagaagaagccaaatacatgctctgaataatcaagcatgattgcttgaaattgatggcatattgatacttgcaatgcttttgcggaatataggcctgtgcatcaatttgactgattgcattaaacataatcatatgggcataaatttccatttcaataaatttatcttgtttggaatggaactgtacactgcctaaagaatacttcaatttcttgaaggaggtctcaataccccaacgcagatgataaagctctttaattctttttagcggataattttttcgatcaagattggttagcacaacttcccattcttctttgcctgatttggcatcattaattctaaatttgcaggctcgaaattttattgtgcataactcgccaaaatcccagcttagatcctgggtatttttagagcgatacttaatatattggcgataatgatgctggacatggtgaatattctcactggctttatgcgtgatgtagtaatagttagaagtagttaccaggcaggaaatctcacgatcacattcttgatcaggcaatgtcgttatttctttaactccgccttgtccagccttagttcgtattatgtaatgacagttaggcaggcgattgcagttttcaatcatattgaaactagtgtagccacgatccattgttacaatatatggaccacaattcaaagctttaagcatttgaacagccgctttgcgttcatccatttctgatttaggctgaaaaatacaatcctggtaggtattattcaatagatcatataaggcattaacgtgaatttgacaatagggtttctttttatgagaagaagcttgtacaatgttattcgatttcggattccagatttgattaaagtcagagccatcaatggcaaacaaacggtagtgatgatcaaaaagttgaatattaaatagattttgattaaaaacagtcagaatatgtttaaaacaagcaggagaaagctggcttttgcgttgaacataggcagaagtactaactactttatcgttctttttagttgcatcttcgccaaaagctctaaagagttcactgtttaaattctgaccttgcatgttaattgtagttttaaggactgtcgctgcatctaaagtgcgtttcctggtaaaagcatgaggattattaataaaatcgtgaatatgatccccagtattattgataatttgatcaagacgttctagaatattcttatgaagggctttcataattaacaccatctttctggcaataattttgaaggtttaaaatatataatatataagataggcgaaaaggctggtcttttcgcctttattttatacaaaaaaagagatcgaatccaaatgattcgatctctaaaaaagcacccttaattgtcaatgtcttaacttaatgacattgagactgacccagaagcctttaaatctttatagtaataaatatattgtatctagtagtattgatgagagacatgatataacaaatttattagagcaacaaaagatagattataaagtggtgccacaaaatttatacacaacttataaattagcattagtaaaacatgaggataggtaaaataatggctagagaaattttattaagtttaaaagcacaacttagagttccaattgctgtatttttttctattttttttccaattattatgatgattatgatgatgacatcttacggtaatttttcattaagaaatggatatcactttatagataagtatttttttattagtactactataggtattctacctctaaccttaattagttttcctattgatataaataatttgcttgaaactaagcattacttacgtttgaaatacttaaatgttgatttaaaaaaattatttttatcaaatattatttcttatttgataattgtatttatttcagttggaataaatttaatgaaactgtcaaatcttttgtgtaaatagttctttctcgtaaattgattttttaatcatttatttaatcaaaataggattctaaggtatcctgaacctgaccaaagcctttatgaattcggtcgaaatagcggtcattgtagctcattgcctggatgccaataaatacatcaagcgactgttcagttggaaactctgccttaggcttagctttgcgcttgatcacattgttaaatgattcaatcatgttagtcgaataaattgaagctctgatctgcttgggatagttataaaagaccagcagatctggttctatgtctttcaagcttctgataacatggctgtaaaccttgccccatttggtatagaagtcatgcaggacagctgtggcttcttctttgtttgtctgttgatgcacctgtttgaattcgttcatgatcttttcacgatcgtcgacgcgtactttagcgcagatattgcgcatgacatgaaccaaacagcgttgaaaatgagctttaggataagtcctggccaaggctgttttcatgccaacaacaccatcagaaagaaagagttcaacttgcttcaagcctctggacttcatgttttgaagcatctctgtccagacttcaatgttctcactaggagcaatgcagtagtcaatgacttccttatgtccattaggtttaatgccaatggcaatatagactgcttcacgctcaaacgtttctcggcgcaaaggaaggtatgtcgcatccaaatagacgcagaaaaacttgtcgcttagcttgcgtttgtggtaagcctcaaccttggggagcatctgcttggaaatatttgatacctgagctggactgtaatggctgccatacatcttttcaattagatcggctatttccctggtggtcacgcccttggagtaaagcttgataatcatgctttccaagatatccgagtgctgcttgtagtcaggcagcgtgtgctgatgaaattgaccgttgcgatcccgaggcacttgcacttcaattgggccaaattgcgtatcaactttgcggaaataagcaccatttctagagttgccagtattccagccatttctggcatagggatcatagcccagaaaggcagtcaattcagcttctagcaagttattaacagcctgttgtagttctttgcgcaataaatcatttattttgtctggattgaatagagcttgagcaaaatctttggtaaaatcattcatgaaggagttcttctttctgtatgtgttttttttgttcaaaccaatcatacgagaaaggaactcctttttctaatgtttaaagaaataaatttaaggaatcattcatccttacacaaactattttacagtctcaatttaatagtaggaaaaagtatatataatttaagattacctagtatagagtatttatgttatttttttattcaattattctattgtgcgatagttctacttatatttggcttactgttaagtttaatagtatcagatatcaaagctttaatgcctgtaggaatgactataatgtttatattatttatggttataggtgtttttgtacagtatagctccttaccgaaaattatacgtactatttctagctacataccagtaaaatatttggcaaatgatttctattatatctggattggtcaggctaaatggaatatgccattttttaaatgtaatacgatctggcttatttttctgtgtttgatttgttacataatttatagaaggaagaataatgttacgaagattttcaactagtaaggatttaagaattgggatagagataatagttggaatcactttatcatttatcattaattttataatgatttcaattgggtatgccattacaaatagtgaaaaattaaaagaatattcggtcaattattttggattagtcatatataaaataaagaattatggaaataaaggtataccagtttccaataatatgatgtttatcggaatagttttaacaataatatttgtttttattgtagagtgggttgtatataagagggataagaatggtagagtatgagcttaaaggattatttaatcaaaatacgctttcaacatcagatattagtaataataataattacaataatcaacaattatttgatcatattataagaggaaatgctaattctgagatgctgacatacttacttaatatgaaccatcagcgattgaatgattttaagagtatgcatcaatataattatggaaattttgcatccttaatgaacagtgtagaacagtataacgaaatagaaaatgatgaaactattttgctacctaagccattgagaataaaaaataagttacagcaggttctaaagaaaagaaaaagtgttagaaattatataggcttatcatgtgatttacgagaattgtccacaatattgatgtattcatttggaatctcgggaagaaaagagaattttggtggaatagtcgcaagtatgcgatattacgcttctggaggtgctctatatccaatttcagtgattatatatataaataaggtggatggattgaaaaaggggctgtatttatatcagccaatgtatcattccttattaccactaaatattaaaactcaaatcgatattaataaattatttgtaggaagtaacattgatgttaaaaatagtagcttttttgtattttataaatatgcgattagttctacatatttaaaatatggtgagctatctttagctaatattttgattgaagcgggaatgatggcgcaaaatttttccttagtaactacagcatgtggttttgggtcatgtccaattgcaggatataacaaaagatttattgaagatatttgtaatttagatcatgttaatgagcatataatttttactgaaagttgtgggagaaatgaatagcgatacgattttttttgtaaaaaaagatacacatattaattctaatataaacgaatggatattaagtaagggaataattcataaaagcactttaacaataagtaaaaatgaaagtagtactttgtttgtaagtttattcaagcaattaatacaaaatcaggaaattaaagttagtgaagatgatgaagagtattcagactttaaaaaacttgttcagcttggatttttaggaataagaaataaaaataaaaaagtagcacttattgtggaagaaagtgcaaaaaacttctttgaaaactatttaaaagatgaaaatatatgtgttagctcattagatgagtttataactcaagatacattaaatattttaattgaagaaaaaaataatactaaattaaataaaatagttcaaaactataaaaataaatacaaagatgtagatttgatttttgtttgttctttgtattatgaaaattatttaaaaggaatcaacaagctaactaaattaattagtatcccatataatataggattttatgataataataatatatttgctactagaataatacatggagagactggctgctatcaatgtcttgaaaatcaaatactacaaaaatttgatggatatatcgaagattatgtatcagaaatggattctgaaaaacaagtatttgatataaaaaattatggagtattaatatctataattaagtcagagatagaagaactaaatttatactctgatacagagctacgaggaaatgttcttcatttttatttacctacttatgaatacaattttgataagaatagaattcaaagtgattgctcagtttgttctactataaataatattttatttaaagaacaaaatatgaaagcgtgcaatattttagccgaggttttaggtaatgataaatatcaagaataatttagaatataatttattgcgtcaacggatcttgggtggcgctataactggaatctggaaaaaggatactttctttattggcgaaagttcgtatccggtaatgaattataattatattactgcaaactttactaattttgaaaaattcgcttttcctggctatgttcccccgattaattatcatcttagtggctacggcttatcttataataaagctttatcggcttttctaggtgaaagtacagaaagatattctttttcagtcttatatcaaaacattaagcataatatcatttattctgattatcaaaatcttcagaaaaagtattctaattgttatatagtacctttaaattatattaatatttatttttcaaaagaagataaagaaaattatataactaaaaaagatccaataagatggatagcattaaattcactatttgatattaataaaaaggtactagttccgcttcagttttatattatgtataccaacagtatatttaaaaatgaaaaaagaattgtaaatagtgctacatcaacaggaactgcttcgcaagaaagctttgataaaagtctggaaaatgccatagttgagttcttacaaatagattcttttaatctttggtggtatggaggtctaagaggtaaaaatttaaatattgatacagaaggcttattaaaggaattgttcccaaacaataatagactttggatgtttttaaaaaaatttacggttaattttatagatattagttttgacaaagcaattaatgtagttgtttgcgaaattaccagtaatagtgatagtaaactacctaaatatgtagtaggagttcaaggaggattttgtttaaataagtgtattgaacgatccttttttgaatgtgtaactgttttagaatattgttttactcaaagttgggttgaaggttctaaatttaaaaagatttctacaaatatagatgatttaaatgtaaataatttagacgataatgtattgttttatgctaaaaatggaaagcctaaattaatcaaaaaagagaatattttaagagtgtccaaaaaggttactaatttaaaagatttgcttttgaatttaaagagcatctctaagtatgcaggatatttaaatattacgcctccagaatttagaaatcaaaactttgaaatatgtagagtatttataccagagcttttaccaatttctttaccgtcttatccgccttattatcatccaagatacagtaaaataggaggtattattaataatgtcccccatcctttggcttaaaatagcttttttcatcactttgtttccaggcggaatatatttgataataagaagaatattgtccagccatagaaaaagcataacagtatatttaataaccttggtaattgtagctattgtaaataccattattttaaagatcaattttaataggtatattgaaatcatcttaatattgattattccttttacgtattatttttttgagtatgttataaggtataaaagattcaatatcttaagttttaaggctaataaaacaattatttatgttttagttttttttcctatatttgaagaagttgtttaccgtttctttatatttaaatattgttcggttttaggcttttctggaatacaggctatgatatttgcaacgttatgctttgaattttcgcacatatattatttaggctttaaagctattaataaattatttttttcctttattcaaagtatgttgtttttggtttttcaaagtttattgttagagactgtaaaatagtttgtgtaaggatgaatgattccttaaatttatttctttaaacattagaaaaaggagttcctttctcgtatgattggtttgaacaaaaaaacacatacagaaagaagaactccttcatgaatgattttaccaaagattttgctcaagctctattcaatccagacaaaataaatgatttattgcgcaaagagctacaacaggctgttaataacttgttagaagctgaattgactgcctttctgggctatgatccctatgccagaaatggctggaatactggcaactctagaaatggtgcttatttccgcaaagttgatacgcaatttggcccaattgaagtgcaagtgcctcgggatcgcaacggtcaatttcatcagcacacgctgcctggctacaagcagcactcggatatcttggaaagcatgattatcaagctttactccaagggcgtgaccaccagggaaatagccgatctaattgaaaagatgtatggcagccattacagtccagctcaggtatcaaatatttccaagcagatgattccaaaggttgaggcttaccacaaacgcaagctaagcgacaagtttttctgcgtctatttggatgcgacataccttcctttgcgccgagaaacatttgagcgtgaagcagtctatattgccattggcatcaagcctaatgggcacaaggaggtcattgactactgcattgcacctagcgagaacattgaagtctggacagatatgcttcaaaacatgaaatcccgaggcttaaagcaagttgagctttttctttctgatggtgttgttggcatgaaaacagccttggccaggacttatcctaaagctcattttcaacgctgtttggttcatgtcatgcgcaatatctgcgctaaagtacgcgtcgacgatcgtgaaaagatcatgaacgaattcaaacaggtgcatcaacagacaaacaaagaagaagccacagctgtcctgcatgacttctataccaaatggggcaaggtttacagccatgttatcagaagcttgaaagacatagaaccagatctgctggtcttttataactatcccaagcagatcagagcttcaatttattcgactaacatgattgaatcatttaacaatgtgatcaagcgcaaagctaagcctaaggcagagtttccaactgaacagtcgcttgatgcttttattggcattcaggcaatgagctacaatgaccgttatttcaatcgaattcataaaggctttggtcaggttcaggacaccttagaatcctactttgattaaataaataattaaaaaatcaatttacgagaaagaactatttacacaaaagatttgacagtttctattgttaataatatgtttacacataatttttaatttatatgtgtatttacacaaaaaagatatgtataaagttattttttgatattgacttgtattacgtatataacaatatgtgccacacggtttctagaaaaatcctaaagagtgctaattttaaaagcaaaaattgttaagccttttacgcttctagtcagcattagaaatacgtttaagtctttcaaataagttcaatgaagcttgatttgaaaggcttttttgctactttgaactagaatgaaattctttgaaataataaggatttatttgaaattaacacaattcaaacacacagatacgattcatgtgttaagaatgtgcttgaaggaaaattaagagtactaaatatagtgatttaacaggcgttggagcctgttttttttgtgtttggttagggcattttgtttaaattaaattcagtggatttttgtgcaaaaaaatagccatattgtagggttatacatattgactattttctattattaaaattatttcaattcagccacaaacctaattccttgataagaaggaaacttgtaattatcccatgaaaaataagtgtctggaaattagttctttctatttaatctcaatgctatttcaagttagctattaatctgtatcctaagaatccattgctagattttggattccaagcaatacctacaccaatttttgtatattgaccagataaaagaatgtctctatgtccccaattagatcctgcatcatgataaatgaaattatttaagcaaatttttgcttgtgtagatggggtatcagtattatcaactgcacctccagcaagcacttctgcgtattgagtgcggcttccgtctggccttgtatggctaaaacttgtatttgcttcggtagctctagtccttgcatattcttgcagagaagtatcaagtgttaaagaatttagtccctttgattgacgtaattgatttaattgcgcaataaattcttgttctaatttggtagcaaaatcagaatccttaatgtttgtatattcattattgggttttgtatttgtggtttcattatgcttaataaaattgcttgaattagcactttgagtatttgtttcatcggatgtacttttagtaatagcagatgttttagaagtgtcaggttctgaaactttgtgagttaattctgaactaatccatttgttagttccaactttgtaccatgttttaccacggctatccttcttttctgcataaacatataagtattttttaccatgaattattttagtgcggtaagcttttacacttctgcctttcttgagtgttcttgctcctttaatacgcttgcctttatagttgtaaacataagcattgtgagtaagttttacgctgctagtgcttgcttctactacattggcttgttcgttgccagcaacaactgtagctgaaagcaatagagctgatgaaagcgtaatggttgatagtaatttagtaacgtttttcttttgtaacatggtagttacctcctatattccttatttcagattagcaataagactgtaccctaaaaatccgttacttaatacgggatcgaaagcaaatccaactccaatttttgtatattgactagataaaagaatgtctctatgtccccaattagatcctgcatcatgatagatgaagcttctcaattgttggctggcttcttgctctggtgtacttgtgtcgttaactgttcctcctgcaagtacttctgcatattgagttctacttccatcgggtctaatatggtcaaatttagtattggcttcattagctctggttactgcataagattgaagtgtattatctatgcttaatggcgctaacccattggatctacgtaattcatttaattgagttacaaaagattgttcagtttcatttgcaaagtttgagtttatgatatttgaatacgtctgttcatttgaagccgaattattatcttgttgagtaatactttgtgaatctgctttttgacagtttttggaactatttctttttgtataaaatttatcagtgtcagtagcaagtatccatttgttatcaccaattttataccaaattttatcgttaactttttcttgagcataaacttttacagattgtccgactccaatgtattcgccagtaggtgattgattgggagctttatatgtttcacccaatccattatctgtaatttttgcagtgaacaaataatttgattttgtgttttgcacatttgcgagcctgatatagtgatgactaccaatgtataaatattttgtgccacgtattttcttagtgcgataggcttttacatatttgccttttttgagtaatttaacacctctaatacggttgcctttgtagttatagacataagcattatgcgtaagtcttacatttttagtgcttgcttccactacattagcttgttcgttacttgtaacaactgtagctgaaagcaatagagtggatgaaagtgtaatggtcgatagtaatttaacaacttttttcttttgtaacatattagttacctcctacggatattcattatttcaatttctaaattaatgatacatgatgtgaaaatgcatttcactgctgtttttctttgctggaattatatttatctctcgtaaatttataaaaaagtaaaagattgaaaagttaggtgcatcatttaatacaaaatataaactgaaatagattctcgttgaatttggaaactgtcaaatcttttgtgtaaatagttctttctcgtaaattgattttttaattatttatttaatcaaagtaggattctaaggtgtcctgaacctgaccaaagcctttatgaattcgattgaaataacggtcattgtagctcattgcctgaatgccaataaaagcatcaagcgactgttcagttggaaactatgccttaggcttagctttgcgcttgatcacattgttaaatgattcaatcatgttagtcgaataaattgaagctctgatctgcttgggatagttataaaagaccagcagatctggttctatgtctttcaagcttctgataacatggctgtaaaccttgccccatttggtatagaagtcatgcaggacagctgtggcttcttctttgtttgtctgttgatgcacctgtttgaattcgttcatgatcttttcacgatcgtcgacgcgtactttagcgcagatattgcgcatgacatgaaccaaacagcgttgaaaatgagctttaggataagtcctggccaaggctgttttcatgccaacaacaccatcagaaagaaaaagctcaacttgctttaagcctcgggatttcatgttttgaagcatatctgtccagacttcaatgttctcgctaggcgcaatgcagtagtcaatgacctccttgtgcccattaggcttgatgccaatggcaatatagactgcttcacgctcaaatgtttctcggcgcaaaggaaggtatgtcgcatccaaatagacgcagaaaaacttgtcgcttagcttgcgtttgtggtaagcctcaacctttggaatcatctgcttggaaatatttgatacctgggctggactgtaatggctgccatacatcttttcaattagatcggctatttccctggtggtcacgcccttggagtaaagcttgataatcatgctttccaagatatccgagtgctgcttgtagccaggcagcgtgtgctgatgaaattgaccgttgcgatcccgaggcacttgcacttcaattgggccaaattgcgtatcaactttgcggaaataagcaccatttctagagttgccagtattccagccatttctggcatagggatcatagcccagaaaggcagtcaattcagcttctaacaagttattaacagcctgttgtagctctttgcgcaataaatcatttattttgtctggattgaatagagcttgagcaaaatctttggtaaaatcattcatgaaggagttcttctttctgtatgtgtttttttgttcaaaccaatcatacgagaaaggaactcctttttctaatgtttaaagaaataaatttaaggaatcattcatccttacacaaactattttacagtctcttaatttgacaagcaatatacagaaattatcaataaaaagtacgttttgctataccttttcataaacctgactacaatgagagttgaagaaggcgtttttgtatgacaaaagaatatgaaaaagaagtcaaagaagcagaaagcgtattggaggaccaaaagttaactgatagtgagatttcacaagaattgatttccaaagataatccaactgaaaatgtaaaaccatctgagattgatttcttgcgtaaaaagccaaatttgacaacgcaaattgatttcactttgttagctgatcttgctgggttatccaaggaagctaaggcagaagcggctgtatagataaaaattttacgtagaaaaaagaccggtttgaaccgatctttatcttataaaaatttactttaggagcgtttgtgaaacttagctactccccaactgattagatagaaagtcgaaatcaaaatgaattgaatttttaattctaaaatgaatagtggaaagtaaaataaaacggaaaacaatagaataatagcgtaaattccttcgaatgttagaaataatctgtttctttttctatttttaagtgttgctagtatcattttttcattcacaaagatccctcctaaaaattatgaaattaagaccaacttaaataaggaatagtccatcggataggaacacctaggagccaatgtccggagctgagaaaagtgttttttaacacaacggtagtaacaattgcaataactgcgagtactaccaataagattagtaatgtactttgtttaatttttgacatgattaatgcatcctcctaatattttttaaacttctattattttgctgggataatgaccggtaattgccaccacattactgtagcctcctcccttttttaatcatttagtcggtttggttaaatactactccttagtgactagaacagattaattttgtatcacatagtttacaaattatttgggccaagttttaattaaatcttgataaccatatttttgtacttcatttctaattttttgcgcttcctctttattgtttaaaaataaattctttaaatataaagcagcaatcttataaagcaaaaaatgtatggttggttttgattccatgatgtagtcaattatttttggaacatgcattaattgaagtgattttttagaaagttttctattatagcaaaccgctagataattctcgaagacacgcaagtatctttcttgttctaattcggagatatttttattgcttttcatctcgttaagtagtctattgataaaaaatgcaagggtatcttgttcccagagcggcattgtattagtaaaaagtcgcagtaattcaggattagtcatccagttttgtccttcgttaaattcaatgaatagatctttttttattttgggatcgatttgatttaatttattttttaaatatgctacagaaatcatagctcttaattttaaaatcttagagtgagattgtgacagaatttcttgatagcatgattcaatttcatcaatttttcctacattgaaggcttgttccattttattatttaaatctgattcaatctttttttgctttgaagtataggttgctcgcaataattggtaaaagtaagtaatatcaacatcatgttcaaaaagaatcgcggctaatttatctgcactaattctgctttttcccgcttctactttcgcataaaaaggccgagtaacaatgttagcagccatttctttttgagtgaggtctagattttgtctaatttttcgtagtgcttgtccaatagtcataaaaaatcctttactctaaaatattttcttctctacgatatatgattattataaatgatgaaaatataagcggataaattaaagagaactatggatatcggaacggcattaagacatttgagagatgatctaggtttgacacaaaagcaaatgattcaggggacgaaaataactgttagtcactattctaaattagagaagggacaaaacaggatatttatcgaaaacctagtcgagatattgaagcaacgaaatatttctttatcatattttgttgatcactatcttaatgatgaaaatagtgaaaaagaagtaaattattcagaaatattaaatattgctttttacgaaaaagataagatcgctgctgaagaaataaaacgacaaattttttcagataagagttctagcaatgaattgagagatagagcaacattaattgtggatatgatagacaaccagggacagagtaatgttgatgctcgaatcattaattctattttcaaacatgacaactggactcagtatgacgaggcaataatattattgggtaatattattagaactagtaatgtattaaatatgagtcctttggtattgactctaattagaaaatataaagatctagataaagaaaaaatcgaaaaacaaagaaggttagcaacggttggaattaattatttatttaattttcgaaagttaagtaaagagtttaataaaactgtgctaaaaattataagctggattaaaacaacatcgattgttcctgagttaggcattattcgagaattaaatgcatattttttagcagtttatgaaggaaacatttctgtctcaactaatatcaaaaatgtccttaaaatatcaggttatcaaaatcttgctaatgatttacctaattaatcccctgagaggggattgagttgctgtggaatgagaagtagataaaatcatagttaattaaatatgaaagagaggcatagtaatttgattattgttagttatccagttttacctgaataactctgagttcatacagtacgaggagatataaattatgaaaaaaagattttgttaagcctaagtttagtagtattaggaaatactttgttttttaattcgagtgtagcttctgcagcgactaataatagatattccgtaaataatacaattcgtcaggcacctaatactggcgatgttcctggtggatggggcattactcctggtcatacacattggggctaagtgatagaagcgatgaatgaattttcattgctctttttattttgggatgcgaattttatgaagaaaagtaaaatcatatttttaatagagcttgtattaaatattattgctgctgtttttctagtaataaataattcattcaaaaatttattagatgtaggcgttgtatttttactacttctattgcttatttggaattttttaagaagaaaaattgagattagtttaaaactatcatggctcaatcttatgatattaccagcaatttttacttattgcttaaatactgtagctaatgttttattggtaaaatatcctgttaaaagtgttttaatagctataatttatagtttgttattcttagtttatttgcttccggtagtaattactaatgcgggattggttaagaataagtatgctagagtttttattgcaatgtattatattgtgctattactttttagcgaaaacttacatatgaatgactacttatcatcctttgtaaattggtctcactctgaaattcttaatgggttagcgttaattccaatcatattttgcttatttaaaagttgggatattcgagcaaagcttaatcttaaatttaggcgatattcaaatatacagttaatagttttattagtagctgtattctttgctgcttggtattccttctttcatagctatgtttatattgcaccaactttttcgcaattattttggaattgggacttctcggaaattatcccaactgaacgagctgttttatggagtttaggagcgattttattcgaagaaggattccggtatctattaataattgtattgcttgaagtttttaaagtgcaaaggggtcaaattgactattttcttgagtgcgctattttttggattgatacattatgccggactacttgaccaaggcccaatatttataatttcaacgcaagcaatttttgcttttggttatggctgctttttggcgacactgtacttatattctggaaaattctggttagtattgctttcacatttttcattagatcttattgcattctcgctttctgcaggtggtggcggaatactatcatggtatggcaataatgatctcttgagtaatggtttgagcatggtttttgctttagttatgacattgattatgtttttaggtaaacaaaggaaaattatgcaagaaaatgctgctagattaattaatgcatgatgcatttaagatggtcgaaagatcatcttttttatgcaataaagtgtcatatataattgacacctactataaaagttgctattattttaaaaacgtcacatataaatgacatctaactagatgaataaagaagaattcaatgaatcgagtaagggaatatcgtaagcaaaagcaaatatcacaaatggagcttgctagacgaataggggtggcaaggcaaaccattaatttgattgagaatgataagtataatccatcgttagaattatgcctaaacttggcgcatgcattaggaacggatttgaatactttgttttgggatggggatgaagcaaaatgagacgagaaagtttatggcttaagtttgtcagatattggtatggcattgatagtaaattagacgagcggcaattagcagaggttgaacgaatcggtaataatgcctatgtaatctctggtatagtggaactgatcttactggttatcacgctaattatggcattgactattaaaagtgagctggctttgtggtttttacctttggcgattgcaattatgatgctgatgatgagtgcttatacttatttgacaatgcgaaaatttaaaatattctctgtcgaaattacagcagatgaacgccccaaagcaattcgtagaatatggataaaggctataatagcgggaataattggtgcagtttttggtacattaggtagcgcgctaggagcttcttctgtgcaaaataatctagtaaatgtgcttgatttttggccacaaggtttatggctaggcgtatgttgcggtgctggtagtgcgattggaagagtgcaacgattgaaagtaattaaagaagacgaataagcgaatcgaaagtagtcgatccgctttttttgctgaaaaactatataattaaagtaacaataaaatttacagcaaggcaaaaaggatgaaaaaacaaaataagactggctcaattggcgtagtgggtgccacggccatcggtgttggtggcatgatgggagcaggcctatatacattgctcggcttggccgccaactctgctggtgtttggctgccagtatcatttctaattggaggcattgtggccgcattttcagtttattcgtattcaaagttaggaatgaagtatccagatcgaggcggtgccgctaagtttttgctaaaagaattcggagatggcctgctagctggtgggatgaacgtcttccagtatatcggctggattatcgccatggcgttatatgcgaccggatttgcggaatatgcctgccaactattgggaaaatcaagctcaggctggctaggtaaggcaatcagtatcggaattgtcatcgtggttgtggcaattaatattatgggttcaaagcaagtggcacgtgcgcaaacggcaattattgcgtttgaattgttaatcttactgtcttttgtagcggtaggtttaactaagctgcatgtgccgacaattactagttcaaatagcggcaatattgtaggtatcctatctgctgcgggtttactttacgtaacttatgaaggttttggcgtagttactaacgctgcagggagtatggtaaatcctaaaaagcagttgccacaagcgctgttcttttcattagggatcgtcatggtgatttacattgtagctagtgtagtcgtggtgatgaccttaggcgttcaaggcgcagtagctaatcaaggccacgttttggcaacggctggtaagctagtattaggcaactggggtctgttcatcacttcactgattgtctgcatcttcgttgtgattttcccattatcagctgttggtgagatggccagcctagcctttttattggtgtatgccatggttaacttaggccacttgcgcattgcaggacaaactggggccaagcgctggattttgatttgctctgttgtattgaatctagctttgtttgctttgttgtttattcagacaattctcaaccacgaaactttaacttggatttcagtaattgctttgttaattattagttttttagttgaacttgcttggcgaaaaaagaataaacgcaacctgcattgattaggaaaaaaatagtaatttatgatacaaaaagtcgacttttgttccacttattgggtacaaaagtcggctttttgtttttttcgttgtcaaaacaatatctttaatattttaattcagatatactctctttgatcaagtttgaagtgagggaaaatgaatgaaaaagttattgatcggaagcgcagtcttagctgccttattaattaaagaaaatatcgcagtaaatgcggcaatagagcaaaacgaaacaacgcctaagattgcagttactgacaaaaaagagaagccaaaagaccagtctgataatagttttgcaggtcattatgaccaagagacaaattttattacctgggaaataaggctgaatcccaagaaagaaaaatatactggtgatttgaagttggaaaatttaattccagaaggcttagttctagatccagatacgattgaagtaattaagaatgataattttattcaaaattctagtttagttaaattgaagaaaaacaaattaacagctgaatttcctgctaagaagtattcagagagcacaattttgattaagtatcgaaccaaggtggaagcagagcctaatgagcctaattatcttcgggtgagtcagtcctttactttgggcgatgatcgagttcaagaatacgagcaagaaattaaatacgatcgaagtaataagaattttaacattgaagcgccacataaatctacgtttagagatgataatcaaatttcgttaattaaaaaatctaaaagtaatgaagaacgctctgaagattggcttaaacgtctagcagagctgattattaataaaaaagaaactacttcagataaaggaggtgaaaaagttcaaggacaggtcaaagatcaaaagcagcaagcttccccagaaaatacaaacctttcacgcactccaactgtcaaaggcttgactggttttgatactaaggctaacgaggtaaaatccacagctaaaatagattctgattcagtaaaaactactctagataaagacgagattaaggacaatgcaagtactatctcgcctaagtcgcaaaaacacgatactcatgtcacactccctaaaagtgacacatcagaaactaaggcaaaattacctaaagctggtgaaactgccggtgttatgctcagcgtatttggcataattttaataattgcagggtggacagttcgaacaaaattcttaaaataatctatatttgtactaaaatacggattttcaatagccaaaatagactctttcacgtattatttagatagataaacttgtatcatgaaagagaaacaaacatgccgtacactatttcagaaattattgttttattttttacttattcagttatcggctggctttgggaaaccttttattgttcgatcaaagaccaccattatgattatcggggatttctgtttggtccttactgccccgtatatgggttcgccgttactacaattttaatttgtaccaaagacgtgcgagataacctgctccttttatttatagtagggactatcgttgccactattttcgaatttgtggctagttggctattagagacaatctttcacatgaagctttggaattattcaaaattatggggtaacattcaaggtcgagtggccccaatgatttcattattttggggcgttggtgtagttttattagtaaaatttattcagccaatcattcagaagctcattaataatgaagaaaagataactcatggctggctagctgtgggtattaccattgttatgggtattgacttagtattaacagtaatcagtgtcgagagattccatactacaactaagatgtgggatgtgcatgttaaccactttattgagcgagttagaactaaagtagaaagtcatatgcctgagaaaggaaaattgcgggttggtgattggcaccactcagtgatgcagcactatgatgaattacaaccgcaacgattaagctggaatcataagcgctacttgaagagctttccaaaattaaaagttactgatgctcctaagttcatggaaattaagaaagaagtcttgaagaaagaaagctaactaacataatcttattttgtgggattgaaaaaagtcggatgatcatattaggtcatccgactttttcttatccattaattctatttggttcacgttttttactttttatttcggtgtagttatctaaaacgttggcatagcgtccaagggtgaaaaggtaatcagataatcgattgaggtattttaatacgtcatctgataattcctgttcatttaaacttaatttgaccaatataatagcaacaccatcaactcctgaaactactgaagaagaacatctgacagtaaaagatcatgtgggttcatcaactttaagaagaggattaccacaaactggtgaaaagaaatctactttgaatgcaggctttgcccttgctggcataggcttggctttgcttgcagggatgttgtttgatcctaaaaagaagcactaatactgaataagaattaagttcgttaaagatcgaatcattttgggttcgatcttttttagtaacaaaatttaaaaaatcccaccttcgtgaataattgaatactttatatatttcaatcgtccactttagtgggattgtattaattcaggatgatctttttgaatttcctgtttttgaagggcagaccaagtccatggaagagttttttagtcgcctagaaactataggcaaggcttggcataaagcctatgataccattgattccgatacagatagagtcattaagagaactaaaatggatgctcgtactacgttagacctactagaacatctatcacctgtacagttctcttgaagagaaaaagaatatcagcacgtcaccagtatggttcttagactatgatcaaaaaatttattgtactgatgatgccatcattggtcagatgcttcaaaccattaatcatgacattacccgacgcagcagtcgtagcttattacactggaaaattcttaaacaaaattgttccagaaatttttatttttgatggatattattttttgcttggttctaagcgattttatttatcaaagttaatagttctatgttatattataagtgttataataatgtaaaaattattaagcattgaaatatagtgcattatgatacgaggagaaagatcatgttagaaagagtcccaaaatatacactaagaaaactgtcagttggcttggcctcagtgatgattggatcaggaatactgatgaactctccaaaggtacttgctgatactattaacccaaatgaaggtactagtactgctgttcaaccttctagtcaagataaagataatagtgagccaagtactcaatctggtgctactcaagatgaaaacattgattctaacgcagctgttcaagagagaagcgacaactcagttactgaaccagcaaccacaactaatgctgaagaaaaagtagtggcaacaaatacccaagatactacgcaagataaagacaagcagacaaatgcgaatgaaactacgcaaaatactaccaatgtcgacaaaaaagatactgaagtaacgccgactaacgacgcaacaacagctacaccgaagacaaccgccaaggttaacgcaccggctgcaccaacagcaatgaaggcagcagctactgctgaaacaccagatccaacggttccagataactcagctaatactgctattatcaatgacaagaatagtttggaaaaaatttggcttgaaacatctactgcgcgggcccaggtctacactaccgttaagggaactgatcaaaaaatctatgtcagttcctatgcagaattcggtaagcgacttaattcattaatttttactaatcgctttgatccaaatagtctagaattacacattgaatatcaggtgttaaaggatagggttcaaaatttcattgtaaattggggagactggctccgactagataccagtagaattggtaaagatggtctaactttcactacagatacaggtgaaaaagtagcctatacgttaacaccaggatggggggaagtacaaaacctatgatgaatggcttagtgaaggccaagatatgagtaagataaatgctcttaaaattggcaacaatttaaaggccgggactaacttcgtattaaccgttcccctaaaatatattggtagaactgatggcacaaagcaatttaacaatgttcaagttgtagattacgggcagccaaatgctaatatggtgttcgattttattgaattacatccagagcaaatcgatactccagaagctccaactactgataaagagtcagttactaccggtatctataacaatccgttagctactgctacagactggtataaaacggagcatggtgaatatgttgcatactatacagctaaagggaaagatggtaagacctatgtaactggatatgtggctgccaatggtaagtctgagtcgattatcaatgttgatcagattgatctaaataccttggaataccatatgatttaccgtaatggtgacgaagaagtagcggccggtatttcagcaagctttgctgatggtaagactctagtggttgatgctagtcgtataggtgctgatggtatccgtttgaagagtcaacagggttggtcttataacaacgggggttatagagagaatactagtgggagactctattatagttgggaagattttcttaagaaccataacggatcggtagataacctcgttggcatcaatatgaatgcatccgctttcaagccgggcgatacaattgaagtagttgttcctgttaggtatattgggaaactttctgatcaagttcaatccttagaatttaaatctgaagctagaaaagatgtttcggttaaactctacttcacaactgtgcgcaaggacttaagccaggttaagcaggtagtcttgcttccgactgagttcatgggagaacaacctggtcaatcaaactggaagctggttaaggaaattgaaaaagatatgccaaatgggtgggaggccattaaaattagtaacttcccaacctataagggatcattcaatatggattcactaccaaaaggggacttaccatcggttgtttatggctctgcgcaatactttgttgacctccaagaaattcagaaaatttttgctaaccatggttacacggtcaagtatgctaacaacaacggtaaagctcaggaaatgccattctatggatacgttaccctgccactggcccttattgatggtggtggtaaacctgttgccccatctatctggacaatccaagttcaagctgtgcctgctattattttaaataaagatcaacactatgtggcagatccgaatgctaagccatgggacaccacttcaatgattgatgagatttatgctgctgatgacgcaggacagcggaagacgcgcgatcaactagaaaagttgccaaagacggacgtggatattagttatgaataccaagctccaggggctgctacagctgctccggttgataaggtcgacttgactaaggcgggggtatacactgtcacttacagtcatacttatgctgatgggcgagtagttaaggatagtcgcaaggtttatgttgatgatgttaagcaagaaaccaaggacattactcgaacaattattgtccacgagccaaacggaactgaccaaacagttatccaaaaagcaacattgacacggaaagtaattcttgatgcaactactggggaaatcaaatctgtgggtggatggtctactgctaagtgggaaagatactcagctccagaatttaaaggttacactccagccccggctcaaattgatgaaactgctgtgaacaaggacactcaggatacaactgttgagattagctatacagctaatgagatcacaaagccagaaaccaaggacattactcgaacaattattgtccacgagccaaacggaactgaccaaaaagttatccaaaaagcaacattgacacgggaagtgattctttatgcacctactgggaaaatcaaatctgtgggtgaatggtctactgctaagtgggaaagatactcagctccagaatttgaagattacactccagccccagctcaaattgatgaaactgctgtgaacaaggacactcaggatacaactgttgagattagctatacagctaatgagatcacaaagccagaaaccaaggacattactcgaacaattattgtccacacgccaagcggaactgaccaaaaagttatccaaaaagcaacattgacacgggaagtgattctttatgcacctactgggaaaatcaaatctgtgggtgaatggtctactgctaagtgggaaagatactcagctccagaatttaaaggttacactccagccccagctcaaattgatgaaactactgtgaacgagaacactcaggatacaactgttgagattagctatacagctaatgagaccccagagcaaccagataacagcaaggacaaaggtaataatgacaacaatggtggtaacaattcagatgcgattgtgccaataaatcctagtgacaataactcaaataattcaaataatgcaccaactgacaataagaagactgatgacaccaagaaagataatactggcaagaagattacaaaggagactcctaagaaggtaaagaataataagtctaacaagaccaaatcaacgactacttctaaatctaaccagtcttcaaaggctaagcgaaccactaaatctggtacgattagtcctaaggcagtcgctttagctaatactactgctggtctagctacttcagctaaggcaaatatggaaaacggtattgccaagaacaacagccaaaattctcaaactttgccacagactggtgaaaatgaaagtaaggtagcatttgccgttgccgggttgttagcagctgctttgggcatttttggtatagctattaatcataaaaaagaaaattaattagctaagttgaataaatcatacaaaaagacgcatagaatagcaatgtcattaagttaagacattgacgaaaatcagactttatgaaccgaattattttggctctttgtcaaacaccctaaagtataaaggtagatagaaacatgacgatgtttttatctaccttttttcttatacttagattgagcttgcggttgaacccttcaaggcagccgttagaataaggcagttttgctccattaagcacagcttttaggttatgtttaaaggtcaatagtgttttgtgcattaaagtcccaatttgatcttggcagttgattaataagttgagctcatgagtattgcccgtttcaacggcttgaataaagctttgcatcaggttatatgaattctctaaggtagtgctggtattgatgccttctgtaactacttgtgcttgagttaagcagtctttgtagtgccagttatagtgaggatgaactttttcaagttcatcaaacttcttcaagtataatttccaaggagacttaagcagctgatattgccgcgatcttttatcaaaggtcttcatgacttggaacctcagcgagttgaatgagcgcgtaagcatttgaatcatgtgaaaacgatcaatgacaatctgtgcattaggaaaacaagctctaacgatatcttgatagtaaaaattaagatccatcgtgaccgttttaacgttagctctagcttggagcgagaaacgaccaaaatacttaagcagcgtcttcttgtagcgagttctaagaatctgaacgacttgatgattatcaccatccaggcagataaagtgcagctggcggtaactcatcaaaagctaaatgagctggcaaatattcgtagctgtcaataaaccggtgtgaacagttgcccagtactctttgaacagtattaattgaaatattgttttctctggcaatgctggtcatagatcgatcttcagttaaagctgacaacactttaagcttagaggcattagaaatagaacagtatttaccaattcagactgagccatagatcagcgctcacaagtgcgacatttaactcgttgcttagctaatcttataatgaccggtaagcttgcattagctgtcggatagtgaatgttggtaatcaaatggccattatgtaagagatctagggagccgcagaaaggacaagcaggttgaagcaattcagcttcatagattttatgcttttgcagtttgatcgatttatagaaatcacctttatttataagaatttgtgtggaaacgatttttattgaagaggactatgtcctcttttttgcaataaaaaatcctgttaacagcttatcatatagataagtcatcaacaggaaaaattatagagccaatattttgagattaattgataggggttgaaaagtaaattttatttgttatagaaaatatagaaaaaggattgttcaagaaattattttacgaaacctgcagtgaaccaagtgttggcactaggcttaagtgaccagccagtgaccttcttgttaacagcagtgattgagtattggttggtagttggcacaacgtatgcttcatcatacatccacttttgccacttcttgaaggcattagcacggtaagtaggattgaaggccttctctgagtcgatatcagccaaaagcttagtttgcttaggtgaaacgaaacgagcaaagttgtatggtgcagcttcattgtaaaggtcgttaggggatggttcacttgaaagtgaccaaccaccttcgaagacgtcgattcttggatcgtcagattgaacagcttgtacccagttgttgaattccattggacggccgccgacaaatttaacatccaaaccaactttcttccattgttggatgtagtttctccaaacaggttcagcggtagttgagttgtttctaacagccaagttaattactaacttcttgccgttaggttgaactctgtattcacccttcttcttgtagccggctttatccaataattcgttagccttcttcaagttgtatgggtaacccttgattgacttgtcagtataatcaccaaattgttcagggatcaaagtgttaacgcggaaggccaagccgtggtagtaacgtttagcgactgcatcaacgttcattgcataagccattgccttacgcaatgatggattgtccatcttggagttcttgttttcaacgttcttgccagacttcttatcccatttacctaccttaaagcctaagtagttgtaggataggggaaccttaccaatgaagttggtatcagtagcgttcttaacatcatcccattgggtgttaactacgccagctatgtcgaacttgtgactcttgatggcttgagtaactgagttggtaccgatgactgtcatggataccttttccaagtttggtgtaccacgccagtaatgcgggttacgttcccaagtgacagattgaccacgaacaagcttgcttacgcggaatgggccgtagaagagtggttgttttctaaccttgtcactagacatcaacttggagaatggtacgtcctttaagtaatggtaaggttcagcgtattcccagaagtaaccgttacctgattgaagcataccaggcttcatttgtttcgaccttgcggccatcttcgccatcaggcatctcaataccagaaatcttcttgctcttgccttcgtgatattctgctaaaccaacaatgtcggcaagagaatcggtataacgttgtgacttggagtctttattagcgataatttcataagcgtattccacgtctttagcattaacttgcttgccgtctgaccacttaacacccttcttaacctcgatagttacggtcttggctttacggtcaagcttaaaggtagcagcacctttattgttaatcttgtattgatcgttgactgagaataactcttcttgtcctggctctgcaacttcagtgtcagtggcagtatcagataattctggcaagaaaataccagtgaagggactatcagattcgatagcataatttaaagtgccaccttttttaacacttttcacaggaacagtttgactgaatttgtgatgtgtttcatctgcattattattttttgaatttttattattaccacaggcaaccaaacttaaagctgccccagaaacaagtgctaatgcaccaaaatatcgttttgctttactcattcaaaaagcacctccaaataaattaaaaatatttgagttttattctatgatattaaaatgaaaaaaaatagaaaaatgaataaaaatgtgaaaaatattatttttaaattatttttgaagctaagattagttttctttcttggctaattaggcatagaataaggaaataacagctttttatgttggaggaaaatatggatacagcctggcaaaaatttaaaaataatattccattacgtcgatttgtggtactgctattaattattgcctgcctttatgaaatacgagcaatgatgaacacagtattattaacttttatttttacttatgtgattgtgcatttaattcatctagtgcagcggtattttcctaaaataccgaaactgtcaaatcttttgtgtaaatagttctttctcgtaaattgattttttaattatttatttaatcaaagtaggattctaaggtgtcctgaacctgaccaaagcctttatgaattcgattgaaataacggtcattgtagctcattgcctgaatgccaataaaagcatcaagcgactgttcagttggaaactctgccttaggcttagctttgcgcttgatcacattgttaaatgattcaatcatgttagtcgaataaattgaagctctgatctgcttgggatagttataaaagaccagcagatctggttctatgtctttcaagcttctgataacatggctgtaaaccttgccccatttggtatagaagtcatgcaggacagctgtggcttcttctttgtttgtctgttgatgcacctgtttgaattcgttcatgatcttttcacgatcgtcgacgcgtactttagcgcagatattgcgcatgacatgaaccaaacagcgttgaaaatgagctttaggataagtcctggccaaggctgttttcatgccaacaacaccatcagaaagaaaaagctcaacttgctttaagcctcgggatttcatgttttgaagcatatctgtccagacttcaatgttctcgctaggtgcaatgcagtagtcaatgacctccttgtgcccattaggcttgatgccaatggcaatatagactgcttcacgctcaaatgtttctcggcgcaaaggaaggtatgtcgcatccaaatagacgcagaaaaacttgtcgcttagcttgcgtttgtggtaagcctcaacctttggaatcatctgcttggaaatatttgatacctgagctggactgtaatggctgccatacatcttttcaattagatcggctatttccctggtggtcacgcccttggagtaaagcttgataatcatgctttccaagatatccgagtgctgcttgtagtcaggcagcgtgtgctgatgaaattgaccgttgcgatcccgaggcacttgcacttcaattgggccaaattgcgtatcaactttgcggaaataagcaccatttctagagttgccagtattccagccatttctggcatagggatcatagcccagaaaggcagtcaattcagcttctaacaagttattaacagcctgttgtagctctttgcgcaataaatcatttattttgtctggattgaatagagcttgagcaaaatctttggtaaaatcattcatgaaggagttcttctttctgtatgtgtttttttgttcaaaccaatcatacgagaaaggaactcctttttctaatgtttaaagaaataaatttaaggaatcattcatccttacacaaaatattttacagtctcaaaataccaacaggtctaattgttgcggtaacatatctaattatcttggcgctgctttatttcgtggttaccatttatttgcccatgttagttggccaaatatctaaaatggtaaagtcagtgatggcgttttatgaatcaaatgaatcatcgcgcttagccagccatgtaacgcgttatatcagtaaaggtgagattgttacgcaggcaaaacgagttgggacttttgctctgcatacggtgaccaattttggtagtttaacaattgctacctttatgtccttgattttaagtttcttctatacgattgaattagatagaatgattgaattttcaaagttatttgttaaaagtggttactttaaatggctttttgaggatattcgctattttggtaaaaagtttaccaatacttttggtgtcgttttagaggcgcaattctttattgccatttgtaatacggccttgacgatgattggtctggcatttatgcatatgccgcaaattattgccttaggcttaatggtctttattttaagtttagtgccggtagctggtgtgatcatttctttgattccattaagtattatcggctattctgttggtggcattcgttatgtgatttatatcttcattatgatcatgattattcatgcaattgaggcctatgtgttgaatcccaaatttatggctagcaagaccgaattaccgatcttttatacttttttagttttgttagtagctgaacacttctggggtacttggggcctgattgtcggtgtgccgatcttcactttcttgcttgatgtcttagggattaaatcggcgaagaaaagtaaaaagaaagcgagtaaataattgagagtacttttgacaggtgatagcattattgcacgccaggaaggaaaaaatgaaccgcaccttaattggaatttacaacagcttttgcctgagattgaactagaaaatacggctgtttcgggaattaattctggggcattttttgccaaattaaatgaattagtactaagcgtaaagcagtgcgataatttggtgatcttgctgggaaccaatgatttggctatgcacaaacaagtgccagcgaggcaatttaagcaaaatatggaaattatttcctcggcaataatttgtcaatattacccaccacatgttctgcttgtttcgccgccagctgttgatgaagctaagcaacgtgtacggaataatacgttagtagcggaatatgctcagatcgtgaaagaagtagcacatgagtatcattttcgttatgcagatctggcacaagctatgcgggatattggcgatttaagcgagatttgtcaaggagtaaaaaacgatggacttcattttggtgatcgtggctatgagattttaggaaaactaatcgctgaaaatttgaaacaaatgtaaaaaggaccgcaaattgcggtcctttatttttcgctattttaatgttgcccaaagcaagcttccagctagcgcaatggccaagaacggaatgagcaaataggcaaaaaagaaaaacataattcctacgactagtaaaaagccgataattttaatgaggccaattcctaatttaaaaaatagccagagtaagagtaatgttaataataaagaaagcatattaatacctccataaatctatgagagtattttactaccaaattggacgaatagaatagtaggaagattaatgctttagaaaaatttagttaccggtaacaagataaatcatattgaaagctctttctgtaaccgctatattttaactattgaaagcgatttaagaaacgagaggaaaaataaatggaggagaaaaaaactgggttacctacgctagctagtacgacaatttggatgattagtttggggtatttgggtgtgcaaatcgcctttactttggaaacatcacagatgagtcgaatcttccaaacattgggtgctgatccgacaaaattaggctggttctttattttaccgccgttagctggattggtagtgcaacctggaattggatcattatccgatcgaacttggattcctaagattggacggcgtttgccatatttattagtcggtatgatctttgccgtaattactatgattttgttaccaaatgttggtagttttggtctaggctatggttcaattgaggctctaatatttggtgctgttgcaatcgcgatattagacgtggcatcgaacatggcgatgcagccatttaagatgatgatcggtgatatggttaatgatgaacaaaagtcatacgcttacgggattcaaagcatgttgtccaactttggtgcggtaattgcggcctttttcccattcttattaactagtttgggtgtagccaatactgctaaaaaaggtgtggtaccacaatcagtagttatttcattctacgttggtgctgctgttttagtaattacttcactctttactatttttagagtacatgaatatgatccagaaacatatgcgcgctaccacgggattaaagaatctgataacaaagaaggtggcggctggattgaattgttaaagaaggcgccaaaggtcttctggcaagtatccttagtgcagttcttctgctggatttcattccagtatttatcaacttacgccactggtgcgattgcgcaaaatgtttggcacaccaccaacgcttcttctgctggctaccagattgccggtaactggtttggtgttttgactgcagtgcaatcaattgcggcggtaatttggtcctatgttttggctaaggtgccaaacaatcaccataaattgggttatggccttagtttattcttaggcggggtaggttatacttcaatcttcttgattcattcacaaagtcttttgattttagcatttatcttgattggtatcagctgggccggaatgaatacctacccattaaccatggtatctaacgccttatcaggtaagcacatgggaacttacttaggtttattcaattgttcaatttgtttacctcaaattgtggcatcactgctcagtttcttaattttcccaatggtcggcaattccatgccagccatgatgttaatcactggtatttcaggcttcttgggagctttatcagtcttagcaattaaggaaacctacgtaaaatagaatatcttctcattaaaaaacacactacaatgtgcaattatgcatgtagtgtgttttgtgatttatctatgtagaaaaattcgccttcgtctttgaacattttgtaggtttctttgatcattctttcagggattgcataagattggacgaatgcaattgggtcatagaaattatcttcttgtccgcaagagtattgatagatcagatgcaatccataaatatcggcatctctttcttcgtcatcaaggccgccataatcaagacaacaattatattgttttaagttgggcctgcaatccatgatatgcccaatttcatgagcaactgtaaatggtacttccggtgaatggtggtgccaattcatgttgatacagatttctcgctcatttttaaatgaaagagagggattattgggatctgattcaaaaaagacgtaaccaatatcatgctcataagcataattaaataaatacgtgattagttgattttttctatagttattgtccactgccatgttttctagcttctctctctttgatgtctctcttcatgagttctcggaccatgtcaagatattctttaggaacaggatgaccatagtatgaatagggcacctcgtcttccaaattcacagtgtcctgcaaacgtggagcagggtcatcggtaatgccacttaaatagtctattgatgtatgcaaaaccttagcaactgcacctaaggccataataccaggttttctggttttccaattgtagatacttcttttgcctagtccagctttgtcatttacttctagtaaagacatttttctttttttcgctaattcttttgtacgctcaaactcaatcatgacgaggttttcttcactttctaaataaaaaagtatgctaaaaagcatattttaacttgacatagtattcgtataagcatattatatgaactgtcaacaagttaaaaacaatctaatgaccagaaaaattctatgtggtagtggaatcaacggcactagtctgttttttatacccttattgtagtatattgacgtattttggtcaatgactaatatgtcaatacttaaattaggcctgcttgttgaacattatcaaacagaggtgaagtccaatggacattcgttaaccccctctgatcatttgatcaaaagagaggtgatttatttaatcatggatattcatgattacgtcgagctgattactttggctttatgggtaattagcgtagtaggtattggcatcttgagcagggttcattttaagaacaagcgcttagagcaattccgcaatactgcagacaacttgatgaaaagctatgtacgcttatacgacaaggaaaatctttctgacgaacagaagattaatcgcgttggcaatgcagtagtgaacagtcttgaggcaaaaggcttcaagctgaacaagcaagaagtgcaggatatctttgcggaagtagctaagcaaatggatgagcagactcaggataagtagtaataatttttaatttttcggaggttttgttatgtacgaaacatcaaatatttcaaataatggtgagttttcattaagtattggtcatcattcagttgtccaaaaaggagatgtaggtcaaaactatatttacgctttgcagttacgtgataatcaaaagagtacttacgtcttacgtagaagtaaaaatggtggtaattttaacactattttagatttacacggttcagcagctggtcatacgcagacttggtcctatgcaggtcctaataattggtttattggaactaagccgagtggaagctgggctattcaaattgctcgtgtaaatattaagactaatggtggtcgtcatactacacactatgattttccacgtttagctcacttagatcgtgccggtaatgtaccatatactggtagtttagtacgagcagaggcagcggtttctccagatcacactaagttcttattggttacagttgataacaatggtaagggatattttactatttataatctggctgctattaatgatgcacttgatagcgtgcaatataatagtggtgcacagcgttattatgatattggtaaaatttcagaatctgatgttgtaaataagtttactattgatagattgtattcaggtgacgttaatgataagagctatattttacattcgcttcaaggctttgatgtagataacaatttaaatgtatttatttcaagtcaaaaagctccaattattgattcagcaacaggtagattcccagcaggaaatacatttcataaagaaattttggttattcccgctaatgctagagatgatcaaaatcaatggactaatgtaaatctaagcgcttctggggtaattgataaaccaggaactggtcgacacactgaagttgaaggtattcaagcaatcgatgctaataatgcatatttaactgttgcatatcatattaaaaaatatgattctttagctggtgaatataagtcatacactgattacagtacaatttataaattgtcatggtattaattaagcgcataaagttggataaaaaatcctaaaaagaagatcgaatgttactgcaagatgtaatattcgattttttgtgttttcaaattaatttatgtaaacttataaaactctaattaacgtaagggggtataattgcagtgtgagaattaaaaaggatgattatgatgaagaaaaataaaattgcattaatttctgcagctgcattgatagccgttacacctttaacggtttggactactcaacctaatgaagtacaggccgcaggcacttcaattagaaagactattatgcatactgcaattggttatgatacaaatggtaggaactcgggcataaaactttatccatataaagttattaacgttgaccagattcctgtccgtattaatgaccaacaatattacaaagtaactggtaaatacttatatataaagcctacaaatatcgatggcgtaacacgaaaaattactcataacacttatatttatagtagctctactaaacgcactttttttaacggaagacgaaaattaaataaaggtgaaactattactacatatggtagttcttacaaatttaaagatggaaaaagttactttagaataggcggcccaagcaagcaatatgttaaagcagctaacttaagttcagtaattaaaagcaatactgcttcaggatcaactgatgtaaataggcactatgccaaagaaactatagtaacagttcatgttagaagcacatataagaagacagcaccaatatttacttttgatgaaaatactactgctgagaataaggctgtgattgtaaaaagagttccaaatggtactaagtttacagttgatcggctagaatatggcaaaagagctgacatggtagcagccaaaatagcatcattcaatggaaatcaggctatttatcatattaaaggtactaataattggatttattcaattgatgttgatcctgagaaacagttgttagagcaatattacaacaaataaattttaatttcagttaaaatgtcaaattaagcaaaaagagaatcctgttccgttgagcagggttctctttttggatattcattagtaaattgtttattttttgatctagaagaattagtcttttacaacatccttaatgttcaaccattggctcttgttgatcttaacgatcttcttgccatcagcctttttgacatctttggcagtgtaggttgaacccatagaaactttttgagtagttttgtgaccttgagcattcaaaacgttaactttttgatttttggtgtctttaacagtaacaaaaatcttgtcacccttcttgattgaaggatcggttggcataacttgtgcagttccaagcttaggagcttcaaaactagcagcttgactaactgaagcaccaacgctcattaaacccattgaagcaacgacaactgaaacaaccttaatcattttctttgataacataatgaatacctcttatcacttatctactggaacttttcgttcctcattccgtacaattcttattatataacgcaaggggaaaagtacattttttaggaaaatatttttactgggtaaatgttactagaataacgttttacggaatttcgtaaaaagggcagaaaaaaacagctattcattttgaataactgcggagatttttggtataagtcccttaacgatgacctcggctcttattataataagaaaatccgcaaattcacagtgttcatattatagctgtcgttcactcttaacttataatcctaaaataacgttctaatctgtgaagtattgcagaatatcctcctcagttaggcgttttttgtcgtcgcctttgacatcaaaaacgattctaccattgtttaaaatgatagtgcggtttccgtatttgattgcgtcttttaattggtgagtgatcatgacacaggttaaatgctcttcttgcacaactttatcagttagttcaagcaattcgcggctagtatttggatctaacgccgcagtatgctcatctagtaagagtaaatcagggcgcttaattgtcgccattaaaaaacttaatgtttgtcgctgaccaccagaaagattacccacaaaagtatttaagcgttcatttaacccattagggagttgggccgcctggcgtttaaattcttgcatatgtttatctaggcctcttaaacgcagaccgcggtgttcacctcgtttggttgcaagtaataggttttctgcaacagtcattcgcggagctgtacccattttaggatcttggaatacttgggcaatatatttagcgcgttttacttcagaaagattggttaaatcttggtctttgagcagaatttttccgctagtaggaaaaatagagccattgataatatttagtagcgttgatttaccagcaccgttggttcctaaaagagtaacaaaatctccatcttcaagttttagattaatatttttgaggatttgcttttcttcattggtaccagcattaacggtagtggtaatattttgtaaatcaagaatagtactcatggtttttcaacgcctttctttaataatttacgagtgcgaaatttttgttcaaataaaggtagcatcatacaaatagcaagaataatagcggaaatcaacttaaagtcgttggtactaaagccaagttggaggactaggagtaagataaggcgataaataatactgccgataacaactgctaccaagcgggcggttaaacttaaattgccataaacgacttcaccaataatgatggcagctagtccgataaccatagtaccgatacccatattgacgtcggcgtagccaccattttgggctaaaaggccgccagctaagccaatcaagccattagagagcattagacctaagattttcatattatcggtattaatgccaagtgattgagccattttttcgttgtcaccagtggcaataaaggcttgaccaagatcagtatcaaggaaaactgctagcaaaacgatgacgataatggcaatgatcaaaccaacaacaatagtaggaaaattgatcggtaatttttgtaaaagctgaccgtttagtaaagtatttttgttaagtaaaccaacattagccttgcctagaattctaagattaactgagtagacgccagtcatcgttaaaataccagctaaaagaacaggaatttttcctttagtatatagtaagccggttactaagccagtgaccatgccagcgaagaaggaaagaatggtagctgctaaaggattgacgccatgaactaaagcactaacacaaattgcggcaccgaaggggaaggttccttcaacagtcatgtctgggaaatttaaaattctaaaagttaggtagaggcctaaggctaaaataccccagagtaagccttggccaatagaagaagtaattaagctcatttgataattcgtcctttcttttgggcagcttgaattacactgttaggaatagtgatgtttaattcatgtgctgctttttcattgattactgtttcataatgggttacgcgtctgactggaagagcagcagggtttttaccatgtaaaatttgtcctgccatttgtccagttaagattcccatgtcgaattgactgacacacctggtagcgagaccaccacttttaaccatagtatcggcagcaggaaaaactgggatcttggcactgttagtagcctttaataaggtggcaattccactagctacagtattgtcggttgggacataaactgcttgaaccttgcctaccatggtttgggcaacttgttcgatatcattggttgaagtgatagtgtaagggataactttaagtcctgttgcttcagctagtcgtctgaattcacggtactctgatgctgatgaatcatcacttgaggtgtaaatgacaccgatgtttttggctttaggtagaatttcttgcattaaggccagctggctggcgattggctggcggtcctggacaccggtaattttaccgccgggatgcgctaggctttttactaaatgggccccaagaggatcgctgaccgcgcccataactacagggatgttgccagaagtattagctagagattggacagcaggagtggcaattccaatagttacagtcgcattttcctggctaaaacgatcgctcattgatttcagattactttgatcaccttgggcattttgaaaatcaattttaagattttttcctttgacatagccttcatctttgagaccctgaataattcctcgatgaatctgatctagagctgggtggctcattgtttgcaagataccgacagttggcgttttcttttccgcatttttcttatttacttcactgacaaatgcaactgccagaaaagcaaaaagagcaataattgttccgattaaccttttcattctttttctccttcaaacaaaaaaggcacttccttttttcgggaaatgcctaaaacaaaacccgcacgttattttccgtgcgagcaatatttcttgaagattttaccagcacagatacgatcttaatgagtcgcatctgtacttcacgaacagaaacaactctagtgctggaattgccaacgattgattgctgtaaatttaatcatgataaaatcttcctttcgttcaaatttgttagctaaattttaagtaattatgagaaagatgtcaaatgattttttgttagatttatttagttttgaataatttttaaaatgctataataattattccggcaaccatcataaaaagaagggaggaattctcttgcgctatcaacaaataatttttgatgtagatgacacaattatcgattttgcggcaactgaagattttgctttacatagcttgtttaacgctcatcactggcctttatctgcggaattgcagcggcagtatcattcttataatcaaggactttggcgccaacttgaacaaggtgaactaacttatgaagagttaagtgaaatgacttttcatgattttattttggatcattttggcattgagattgatggcaagaaggcaatggatgaatatcgttcatactttggtgaagcacaccaattattgcctggggttgaagatacgttgaaatttgctaaaaagcagggctataagctgaccgttttgagcaatggtgaaaaatttatgcaaaatcaccggttggagcttgctggggtgaaaaaatattttgacttaattgttacgtcagaggaagcccattattctaagcctaatcttcatgcctttgactatttcttcagtcgaactgagatcggtcctagtgagacagtcttttttggggacggcctacaatctgatattttaggtgcagaaaaatatggctttgatagtatttggtacaatcatcgccatcgtaaaaataccttgcatttgcatcctaagtttgtagtagaaacttatccagaattggttaaattaatgcagaatgattttgagaagaagtactaatcattatactttttgctcttcaagaagatgccccaaccaatagttaataagctgacaaaaattattaaaatccaaaagccgttttcattttctttacctggtaagccgccgacattcatgccccaaatgccactgattaaagcgggaagagcaattaccagggcagctgaatctagatatttcattaaatgatttaggtgactgtccatcatggcggtaaagaggccgctaatggaattgagcaagtcagtgtaaacgtgaatcattttggtaattcgtttttgcttggtcatgatacttttgacgcgggcttgatttgctagcttgttttctactaaataattaccaaattcttctagactaggtgtttgatcatctaaggtatgctttaagtaaactagctggcgagttaaatctgttacttttttaattctttggtcttagttgttcttcttgcagcttgatctaaatggtcaattttttgtttaattgttactaattctgcatgaagatgcttgatttggatacacaggctttgaaaaattgtttcaataatattttcttgcggttttaattctgaaagacttcttgttgtgccaataaagagatgattttggtcaaaaattgtaaaaattggaattagctcttgttcaattggcaagtcattacttaatagatcgaaactcactaataagtgaccattttttagtttattagaatcaatagggataaaacgagcaacctcaatcgaggaattagggtaagtgaaaattgtaggatctagatcccattttttgattaaatgatcgatatcgttttgcgtcaattgatcttttaaaattatattctgactattagtaagcatatttgttcacctctgtttcttttttagtttaagattaacatgtaatgttttttagactgaattaagttgacttgaaaatatgtttttttaaaaaatatagaaaggtgagaatatggaattacattcacttactgatacttatactttgaacaacggcgtaaaaattcctgtaattggtttcggtacttggcaaacaccaagtggagaagttgcaagagaatctgttgaagccgcacttgaggcgggataccgtcacatagatactgctgcagcttacggcaatgaagaaagtgttggcgaagcaattaaacgtagtggcgttaaccgccatgaattatttgtaactactaaattgtggaattccgatcatggttatgacaagactaaaaaggcaattgatactagtctagaaaaattagatttagactatcttgatctttacttaatccattggcctaatcctgtagctatgcgtgacaactgggcagagcttaacgctgaaagttggcaggcgatggaagaagcagtgaaggctggcaagattcgcgcaattggtgtatccaactttagaaagcatcacctggatgaattaatgaagactgctgaaattaagccggtagttaaccaaagttacttgaatccgagtgatttgcaaccggaagtaacggccgcaagcaagggatatgatttgcttaatgaggcttacagtcctttgggtacaggtggtttattaggcaatgaggtagttaatgcagttgctgaaaactatggtaaatcaccagctcaaatcttgattcgctggtccttacaacatggctttttgccattgccgaagtcagttcatcctaagtatattgcggctaatggtgatgtctttgactttgagattagtccagaagacatgaagaagttagatggtttacgtggtgcaagtaagttggctaatgatccggatgaggttaacttttaatttaatttggaataaagaaaattgaattatcacaagaagtatcttatttttgaagtaagatacttttttattaggtgagacaatgaagaaaattacaacaggaattgtagctcacgttgacgcgggcaaaacgactctttctgaggctctgctgtacaaggcaggaaatttgcggacgctaggaagagtagacaatggggatgcttttttagatacagatcaattggagaaaaaacgtggcattaccattttttctcatgaagctaaattaacgactgatgatttagaaattacgttgttggacacaccgggacacgttgatttcagtgcacaaacagaagaaacgctgagtgtacttgattatgctatcttggttatttcaattacagatggtgtaactagttatactcgcactttgtggcatttgctcaagcgatatcaggtaccagtttttatttttgtgaataaggttgatgcgataggcgctgatcgagggatggcgttggttgatattcaaaagaacttaagtgagagttgcgttgatttttcgaagattgatgatgaattttatgaaaatgtggctgccacagatgatgccttgcttgagaagtatttggatagtggtgccatttatgatcaggacgtgcagaatgcaattgtgcagcggaaagtttttccaatttattttggttctgcgttgaaattaacgggaattacggaatttttagctggttttagtaaatggactaaggaaaaggaattctctgataagtttgcggcacggtgctttaagatttcgcatgatactaaaggtgaacgcttaacttggttgcgaattttgggtggtagcttaaaggcaaagactgagctagctggtgagaaaattaatcagctgcgtagttataatggtgaaaaatttgtaactattactgaagcagctgctggagagatcgttgctgcaacaggattgactaagacgtatccaggacaaggattcggcgtgggggatgcaccaactgcactgcttaagccagttttgacctataaagttaatccccaggataatgatcttcacgcttgcttaaaagctctgcaaaccttggaagatgaagatccacagctgcatgtgacttggtccgaacatttgcaagaaatccacgtgcaagtgatgggaaagattcaattagaaattttagaacagttaatgaaagaacgttttggtttgaatattgtttttgaacagggaagtattctttatcaagaaacaatcactaaaccaattgaagcagtaggccactttgaaccgctacgtcactacgcggaagttcatcttttactggagccactgccacgtaatagcggtattgtttttgaaaataaatgcagtttagaagttttgactaaaaattggcaacatcaaatcatgacggcattgaagtctaaagaacatcttggtgttttgacagcttcgccgattacagatatgaagattaccttgatcggtggtaaaggctcaattgtacattcggttggtggcgatttccgtgaagcaacttatcgtgcagtgcggcaaggtttaatggaaaaaaagatacgccaacaaactattttgctcgaaccgtggtatgatttccgcttagaaataggaaaagatcaggtagggcgtgctttaaatgatattcagcgcatgaatggaaaatttagtacgcctgaaaatattggtgaacgaacagtcatatccggttctgcaccggtagctgaaatgcaagattatgcgacagaagtgcgcaattatacgcatggtgaaggtaatcttgaatgcgtagtcagtggttatttgccttgtcacaatgcggcagaaattattgaggaaaagaattatgatcccgtttctgatctggagaatacgcctaactctgtcttttgttcacatggtgcaggtcacaccgtcacttgggataaggtgccagagactgcacaatatccttatacttatccattagattagcatgataccatgaattgtttatcttgttacatgtgaaacattaaaaatgcggcatagtgcttttcttattaaaaagtgcaacttgaaataagcgaaatatttgactagttatgaaagaaatttcattttattagcaaaatactgctagaaaatcgcttgcatagtaagataaaggtacgatagaaaggtgataaaacatgacacaaataccttttaaagctgtagcggttgatctagatggcacttttttgaccgaaaaaaagacttttgatcatgcgctatttgcaaaagttttacgaaaattgcaagctaatcaaataccgtttatctgtgcaacagggaaccaactaattcgttcgcatgaatattttgacgagtttactaatgaagtagattatgtgtctgaaaatggggcaattctagaagccgatggcaaagtatttaagcggattgcgattgactatgatactgcacaaaaattgttacattttattcaaacagaataccctgaagcaatcattatggttagcgcacagcatcattgctatattttgacgagtatggatcaagcggataaagacgacattagaatttattatcgtgatgttcaggaaatcgatcagtttactgacattgatccagccgatgcgatcttgaaggtttgtctgacagctgatgatgaactggcgcaggtgattcaggatcggtttaatgaaaaatatggtgactgtattcgcggcactagcagtggtaatatgacaatcgacttggtgcataaaggcattaataaggccaagggcgtagacgatatgcttaagcattatggcattgcgcaaaaagatttgattgcctttggcgatggcgaaaatgatattgatatgcttaaggcatgtggctatagttatgcgatgaaaaacgccaatgcgaaggctaaggcggtagcaaagtatgaagcgccaacgaatgatgaaaatggtgttttgaaagttttggctaagtatttagatattgattaatttaatacgcaaaaaagacttgagaagtaattttcccaagtcttttagtttgctttattaactgctctgaaaatattaagtccgctaattagaatgatgaatccacaagctaaaatcagaaccgtttcaccagagctgtctaacaaaattccggcaacaattgaactaatcggtccaccaatagaggtactggtacgaatagtagttagcactctgcctaatatttcatcgtccgcagtaatctgaatcaatgattctgccaaaatattgtgaatactcgtcattagcccaaataagaaaattagtcctgtgaatatcaaccaattgttactgaagaaaattatcaaaagtaatggtactgcactagctatccaagtaaaaccaattgtttttacccgtacggataatcttcctgcaatagttgcacctattacaaagccaatcataaaactgatatagaacatactgtatagtcccgcttgaccattttgttgagcaattcttggcaacagaatggccattgctggcgtcacaaaagaatacaggattgaggaccagaagtaatgacttaagaaataatttgttttaataaacttatagccattaagaatttgattgaggtattttgcctctgcttttttgactttaggtctatctttaatttcttttagggcgtaaaacagaaaaacaaaactgattaggctcagtagactgcagatcaacattacattagctgaaattaaaaaagttaataaaaatccagaaagagcagttcccgctacattcacaaactggtcgatgttgctaactttagaaattagattatttaattcttggtcatcagccgttgtttcttttaaaatagcccggtcagctggattaaaaaattcatcgcagacagatactattcctgcgcagattaatgccaaaatataacttttgctaagttggtaaactgcaattgttgtggcaaataggaaaacagtttgaacaagaattgaatagtaacttgtccttttgaatgaataatgatcgataatggggccgtagaatattgataaggcggcagtggtggaaaagatggcttccgcaattccgacgacaaaggaacttttggtggaagtttgcagccaccagataaagaccatgctgaagagggaattagctagtccgccaacggcacgcgagaaaaaatatgatttcttttttaacatttgaagggttcaccttactatcatttggtcaaaggtatcgtatccacaccatgaatatggatggtttctaataattttatctatttttttaaatacatatttagactcattaacaatgcttgctctgttttgaatttttgacggataaattggatcttcgaaagtgatcttgattttgtatttttctgtcatttcagtatgtaagataataattggaacttgcattttattgcttacccaagagctacctaatggcattgaaacacgtgctcctaataaatttacagtatgttgtggccctagtcccattgaaatttctggtggaattgctactactttgccttgtctgatgtcttttaacgcttttcttaatattaatgggtatggaacaccataactatcaacaagagactgtaaaatagtttgtgtaaggatgaatgattccttaaatttatttctttaaacattagaaaaaggagttcctttctcgtatgattggtttgaacaaaaaaacacatacagaaagaagaactccttcatgaatgattttaccaaagattttgctcaagctctattcaatccagacaaaataaatgatttattgcgcaaagagctacaacaggctgttaataacttgttagaagctgaattgactgcctttctgggctatgatccctatgccagaaatggctggaatactggcaactctagaaatggtgcttatttccgcaaagttgatacgcaatttggcccaattgaagtgcaagtgcctcgggatcgcaacggtcaatttcatcagcacacgctgcctggctacaagcagcactcggatatcttggaaagcatgattatcaagctttactccaagggcgtgaccaccagggaaatagccgatctaattgaaaagatgtatggcagccattacagtccagctcaggtatcaaatatttccaagcagatgattccaaaggttgaggcttaccacaaacgcaagctaagcgacaagtttttctgcgtctatttggatgcgacataccttcctttgcgccgagaaacatttgagcgtgaagcagtctatattgccattggcatcaagcctaatgggcacaaggaggtcattgactactgcattgcacctagcgagaacattgaagtctggacagatatgcttcaaaacatgaaatcccgaggcttaaagcaagttgagctttttctttctgatggtgttgttggcatgaaaacagccttggccaggacttatcctaaagctcattttcaacgctgtttggttcatgtcatgcgcaatatctgcgctaaagtacgcgtcgacgatcgtgaaaagatcatgaacgaattcaaacaggtgcatcaacagacaaacaaagaagaagccacagctgtcctgcatgacttctataccaaatggggcaaggtttacagccatgttatcagaagcttgaaagacatagaaccagatctgctggtcttttataactatcccaagcagatcagagcttcaatttattcgactaacatgattgaatcatttaacaatgtgatcaagcgcaaagctaagcctaaggcagagtttccaactgaacagtcgcttgatgcttttattggcattcaggcaatgagctacaatgaccgttatttcaatcgaattcataaaggctttggtcaggttcaggacaccttagaatcctactttgattaaataaataattaaaaaatcaatttacgagaaagaactatttacacaaaagatttgacagtttcgtagaaaatgaagccaaacttcttattatgcttgactttacgtagaaaaagacctaaaagtgtctaacttttaggtctcagttcagtgtcaaaaatgacacctttttttattttgaattaaagtttatcagcaattatatccattccattttctctgagaaaatttgatattgttttggctttctcaagtttattattgagaatagattcatagtaattagccattattttagcaaaacaatttttaggatcaattgttaaagaattcagtattttaactgaagcatctatattagtatttataatacgttgctttttttttatgaaataacttaaataattaactaagattgcggatattattttttgcttttcttcaggaagtgaatttatattatgggtgttctttataatattttttacaacagaatttatttcatttggatcaaaaatggacattgaaatagcaaatagtcttaagctattttccgtccaattatctgtttcgaatatagttttctttatgtattgtttttcatcattagaaatctgggctaaagtatttgaaattgctgcttttataataataatttgtgccctaatattatccaaatttagttcactattgtttctatcgtttagcattttttctaattctgttattttcgacaaatctttttgatagtaagctgtgtgtaataaattatcacaatcaattttagatatgtgatttttattagtattattttcaacctttttaaaaaaagaagagtaatcaatattatgcaaacttaaaatttgtaataaatcatttgctctaatactacaaatatcgcgttccactttagagtaaaatgatttagtgagtatgttgccagccattttactttgacttagatttaattgttttctttctaacttcaatgcctcgccaattttcattttctttcctccaatgtcggataatgactaaatcatcatttgctttctgatataaataaatttatgcaattgaaattttatgtcctgaaaagtatagggtaaattattcaaggagactgtaaaatagtttgtgtaaggatgaataattccttaaatttatttctttaaacattagaaaaaggagttcctttctcgtatgattggtttgaacaaaaaaacacatacagaaagaagaactccttcatgaatgattttaccaaagattttgctcaagctctattcaatccagacaaaataaatgatttattgcgcaaagagctacaacaggctgttaataacttgctagaagctgagttaactgcctttctaggctatgatccctatgccagaaatggctggaatactggcaattctagaaatggtgcttatttccgcaaggttgatacccagtttggaccaattgaagtgcaagtgcctcgagaccgcaacggtcagtttcatcagcacacgctgcctgactacaagcagcactctgatgttttggaaagcacgattatcaagctctactccaaaggcgtaactaccagagaaatcgctgacttgattgagaaaatgtatggcagtcattatagtccagctcaagtatcaaatatttccaagcagatgctccccaaggttgaggcttatcacaagcgcaagctaagcgacaagtttttctgtgtctatttggatgcgacataccttcctttgcgccgagaaacgtttgagcgtgaagcagtatatattgccattggcattaaacctaatggacataaggaagtcattgactactgcattgctcctagtgagaacattgaagtctggacagagatgcttcaaaacatgaagtccagaggcttgaagcaagttgaactctttctttctgatggtgttgttggcatgaaaacagccttggccaggacttatcctaaagctcattttcaacgctgcctggttcatgtcatgcgcaatatctgtgctaaagtccgggtggatgaccgcgaaaagatcatgaacgaattcaagcagatacatcaacagacaagcaaaaaagaagctgcagctgtcttgcacaaattctatgccagatggaataaagcttatagcaatgtcatcaaaggtttgaaggaaattgagcccgatctgctggtcttctacaattatcccaaacaaatcagagcttcaatttattcaaccaatatgattgaatcctttaacaacgtcatcaagcgtaaagctaagcctaaggcagaatttccaactgaacagtcgcttgatgcatttattggcatccaggcaatgagctacaatgaccgctatttcaaccgaattcataaaggctttggtcaggttcaggataccttagaatcctattttgattaaataaatgattaaaaaatcaatttacgagaaagaactatttacacaaaagatttgacagtttctattcaagaataagatactaaatatttagtatcttattttgcatacaattaggctgaaaaaacacaaaatactaatgttataattgattttagaacttaacaagaaattagggaacttttatgaaccaattatatcaagaaattaatgatgctttatatcatgtatattacgggattcagcggattgaagaagaagaactaaagaaaagtcgtttcaatgatcttactcctaaggaattgcatgcagtagatgctattactatgtatgaacatcctactacttcgcaagtagcagaaaaattgcatttgtcacgagctacaatgactgtgactgtcgatcggctagttagaaaaggctatgttgaacgaatccgaggtaagcaagatcgtcgtattgttcatttaaaattgacaatgcgaggcagagtagtgtgccgagcatatcatgcttatcataatcgaatggttaaaagttttttgcaaaatctagatgagaatgaattgcaaacaatttatcatgcatttaaaaatctggatgagtttttgaactcacactaatattattttgaaattgcttaagcagactggagatattcagtctgtttttttgtggacgaaaaaaatttaattacatagaagtgttcttagtattagtgtaaatagaatttttgagttctatatgaacttgtaatgtgttgacaataaaaaaagagatgataagatttgaatatcgaatagttagatatactaattttaaaaaacgaacatggagatgaagttatgccaatgaatactgctgagattcaaagcaagttagattgtcaagctcccttgatgctgttagatcgagttacaactttgaataaagatcaacaagtaattgctcaaaagagtgtgagtgctaatgaatcttattttcaagggcactttcctgagaatccaataatgccaggtgtgctgctaattgaagccatggtggaggcaacacaatttatgtgggatcggtcagatttgattcttactagagttaaaagaggccgctttcgtgagatggtcaagccagggatgcagttgacaattaaggttaacgccattaaaaaatacgcatgtcaggcaaaggttttaattgatgataaagatgtttgtgtagcagacttggaatttaaggtaacagaagaaaattgaaagatgtaaaaattatagcaactggttttgctgtgcctgagcatgtcgttactaatgatgatctcagtaagatcttggatacttcagatgaatggattgttaaacgaacaggcattaaaaggcggcatattagtcaaaatgaaaatacttcggacttggcaactcgtgtagcaaaaacattattgagtcagagtaatgtaagaactcaagatattgatctgatagttgttgcgactatgacacctgataatatgacaccagctacggcagcgattgtccaaggcagaatcgctgccgaaaaggcggtatgttttgacatttcagcggcttgttcaggcttttcttatgctattagccttgctagaagcatgatgcttaccaataattggcgtcacgcaattgtaattggcgcggaggttttatctaaattgctagattggactgatcgctcaacggcagttttgtttggtgatggagctggtggcgttttattaagtcaaagtaatgccactcatttattgggacaaagtttaaaaacttatggtaataaaggtgatcaattaattgcaggtcatttagatgtttcttatgacattttgaaaaataaaaaaagctatcagcctttaccatgaatggacaagagatatatcgttttgctacgcatgaagtaccacggtcaattttgaaagcttgttcaaatgcacaaattgaacttgatcaaataaattattttcttttgcatcaagctaatagtcgaatcattactcaagttgctaaaaagttaaatcagcctttaagcaaatttggtgtaaatattgacgagtatggaaatacagcggctgctagtgaagcaattctgctggctgaaataattcagaaaaacagaattaagccaggcgaaatcattgctttaagtggctttggtggtggcttaacaacggctacattgattattaagtattaatacgaggagaataaaaaatgactaaaaaagaaattttaaaagatgtacaagaaattgcccaagatgaattagatgttgaaccggaaaaaatcacaatgactaccaacatcaaagaggatttagacgccgatagtctagacctttttgaaattttgaatgagttagaagataaatacgatcttgatttagatgctgatgagagcatccaaacaattggccaattagttgattttgtacaagcagaaatggataagcaaaaataatgagttacggtattctgtttagcggccaaggcgcgcaaaaagcgggaatgggacttgattttttagacgatgatctatttaaagaaacgattgaaaaagcaagtttagctagtcaggaagatttggttgccattcttagagatgaaaatggagaactagataaaacaattaatgttcaacctgctctagtagcctttgaaataggaatttttcgtatgcttaaaagagactgtccccatctaaatattagtagaatggttggtctgtctttaggcgaatatagcgcaatgtatgccagtggtagtctagatttagaaaataccctgagcttagtcagtgatcgggctcgttatatgcaagaagatgctgatcagattgaaaacggaatggcggctattttaaaacctaaactcaatgatattgaagttttaattcaaggcctgcaaaagcaaaacaaacgagtttatattgctaactacaattcgcctaaacaagtagttattgcaggtgaaaaatgtagcgttgcattagcttctaagcaaattaaagatcaagatttggctaagcgaattattatgctaaaagttaacggcgcctttcatacaccactatttaataatgcaaaaactaaaatgacgaagcgattagcaaatataaagtttcaagaaagtaaaactccggttatatctaatacaactgctctgccttttagtggaaattggcgtgagattatggctaagcaattaacagtccctacgcattttggctcatgtattcaatatttagttgaacatgagcaaattgatcaaactttagagattggtccaggcaaggtgttatcttcatttgctagacaagtagatcgtcacttaaagtgtagccatattggcaattatgcagaatatcagacttttgtagaggaagaacatggaattaaaggataaagttgtttttattacaggctcaactcaagggatcggcgcagcaatggcagttgcatttgccaggcaaggcgccaagcttattgtgaatgggcgaaaacaagagttgcctaaagatttaaaggatgcattggataaagagaatgctgattatcggtatttatcagcagatttagcacaggacaatttagaggagataggcaaaacagcctggaatttatttggtaagatagatgtcttgataaataatgcaggtcaagcaaaagataaaatgttcattggtatgcatgatgctgatttcgaagaggtattaaatttagatttgaaagtaccttttttcttgagtaaagcaattatgaaaaggatgaataaagagcgttccggggtcatcatcaatttatctagtgtagttggcttacatggcaatgtgggtcaagcaaattatgcagctgctaaggctggtctaattggttttacaaaatcaattgcacgtgagggagcgttaagaaatattcgagttaatgcgattgcaccaggaatgatagatactgaaatgacacaaaaattgtctgaacgtgttaagaaaaatattttggaacagatacctttaaaacgtttaggttcaactaatgaagttgctcaaggagcggttttcttagtgcaaaatgattatgtgacaggacagacaattgtaattgatggtggaatgaccatttaaagaggcaatatgcaaagagtagtaattacaggaatgggggccattgcccctaatggtaatggtgttgaaaattttgttcagaatactttagcaggcaaagttggcataaaaccaattacgaagtttgatgcatctgaaacaggaattagtgtagccggcgaaattgatgattatgacgaaaatgattatgttggcaaaagagaagcaagaagactagatttgtattctcaatatgctattcaagttgctaatgaagcgatggaaatggcagggattgatgaaaaaaatactgccccggaagatttaggcgtgatttttggatccggaattggtggattgactactattcaagagcaagtaattcgcatgcatgataagggacctaaaagagtatcaccactatttattccgatggtaattgctaatatggcagctggaaatatctctatccgttttaatgctaagaatatttcaacttcaattgtgactgcttgtgcttcaggaactaattcaattggtgaagcttatcgtcgaattaaagaaggtgatgcacaggtaataattactggtggatcagaggctactattaatgaaacagcaattgctggtttcgcagccttaacagctttatctactagtacggatcctgatcgagcatcactaccatttgatcaaaaccggaatggttttgtgatgggggaaggagctggagcactagttattgaaagtttagaacatgctcaaaatcacggtgccaaaattttaggcgaaattgttggctatggcacgactagtgatgcctatcatattacttctcctgatcctaaaggagttgaagcagctcgttcaatgaatcaagcaattgtacaggcaaatattgatcctagtcaagttggatatgttaatgcacatggtacagctacacatgctaatgatgctggagaaagcaaagcgattaaccaagtttttggaaaagatagttcagttttagttagttcaactaaaggaatgacaggtcatttattaggagctgcaggtgccattgaagctgtaattactgttgccagcttagaaaaaggaatcttaccaccaaatgttggttgttttaagcaagatccagaatgtgaagttaatctagttaataaagataatcaacagcaagatattgagtacgcaatttctaattcttttgggttcggtggacataatgccgttttagcttttaagaaatggagcgagaattaatggacttagaaaaaatacaagctttaatgaatcaatttgaagattcagatttacgtgaattgaaaattgatgatggtgatttccatttctatttaagtaaaaacaagaataaagttactcagacagtacagccgactgttcaaaagaccgctaaaaaagtggaagaaacagctcaacctgttgttcaagagaatattgacaccaaggttaaaccggttaaagcacctatcgttggagttgtttatttgcaggctaaacctggacaaccagcctttattaatgtgggcgatcatgttaagaaaggcgacacaatttgcgtgattgaggcgatgaaaatgatgacggaagttaaaagcactttaaccgggactgttagtgagataaaagttgaaaatgaagacctggtcgaagtagggcaacctttaattactgttaaggaagattaatttatgagtaaagaactagggattgacgaaattaaacaaattattcctcatcgttttcctatgctgttaatagatcgcgtcttgtttctaaaagttggtcaggaagctaaagcagttcataatgttagttttggtgaaagctttgttcaagcaagttcctctaaagatccagtttttccttctattttaattgttgaagccatggctcaaacaggtgcagttgcattattgagcaaggcagattttgccggcaaaaccgcgtattttggtggaattaaggaagcaaatttcattgttcaagcaaggccaggggatcagatagttttgacaacaaagttaactaaaatcagaaaaaatattggcattggcataggtgaagcgtgggtaggcaataagaaaattgcacaagcagaactaacgtttatgattggttaggtaaaatgaatgtttaaaaaagttttaatagcaaatcgtggtgaaattgctgtccgtattattcgttctttgaaggaaatggggattaaaacggttgccatttattcaactgcagatcgagaaagcttacatgttcaattagctgatgaagctgtttgcgttggtggcccgcaacctactgagtcatatttaaatattaaaaatattttagcagcagccgtaggcatcggggcacaagctattcatccgggatatggttttttatctgaaaatgcagaatttgctcaaatgtgtgaagattgtggcttaacttttatcggccccaaggcggaaacgattgatcaaatgggcaataaggaacatgcgcgtcaattgatgatggcacacaatgttcctgtaactccaggatctaatggagttattaaaaatgctgaagaagctaaaaaaattgctgctcaaattggttatccagttttgattaaagcaacagctggcggtggaggcaaaggaattagacaagtaactgatccaagtcaaatggccgaagctttagcggctgctcaaagtgaagctaaaaatgattttggagatgatcgaatgtatctcgaaaaggtaatgcaaaatgtaaagcatattgaggtgcagatttttcgtgatatgtacggtcatacggtttatttccctgagcgtgactgctctttacaacgaaataagcaaaaagttttagaggaaagtccttgcgatttaattacggaaaatgaacgtaaagaattgggtgaggttgcggttaaagctgcccgagccgcaaattatgttaataccggtacaattgaatttttgatggatcaagatcatcatttttattttatggaaatgaatacgcgtattcaggtagagcatactgtaactgaaatggtaaccggtgttgatttagttaaagcacaaattcaggttgcgaatggaggaccactgccttttacgcaaaaagatttacgggctaaaggtcatgcaattgaatgtcgaattaatgcagaggatccagcaaataattttatgccatcaattggtaaagtttcgtacttatatttaccagttggcaatccggggatgcgcattgataccgccttatatcagggacaacaaatttctccttactatgattctatgttagctaaggtagttgctttgggcaatacacggaaagaagcgattgctaagatgaaacgcttacttgaagaaatagttctgcaaggtattactaccaatcaagaatttcatttaaatatactaaatgatccaacttttattaaaggtgactttaacaatacttaccttgaacaaggctttatgccgcaatggaggagtgaaataaatgaaactatttccgcataaaaatactcctactgatacacatattaaagcaaataaagcggctgatgatcgagtacctgatggactgctgcgcaagtgccccaaatgccatcatgaaatatttgcgaacgaattaaataaattctatgaatgtccatattgtttttacggctttagaatctctgccaaaaaaagattatcgtggttagttgatcaagtacaggaatgggataaggatattgagtcctcgaatcctttaaaattccccgattatcaaaagaagatcaaacatgctcaaaaaattagcggcttaaaagaatcagtttggacaggcttagctaagattaaccaaacgcaattcgccttggctattatggatccaacttttattatgggatcgcttggtcaaatgactggtgaaaaattaacgcgtttgtttgaaaaagcaacgcttcagcatttaccagtcgtactgtttgcggcttctggcggagcaagaatgcaagaagggattcttgctttaatgcaaatgggcaaggtatctaatgcagtagctaggcatagtcaagcaggtcttttttatttagtagttttaacagatcctactactggtggggtgacggccagttttgctagtcaaggagatattattatagctgaaccacatgctatagtgggttttgctggtaaaagagtaatcgaacagactattcatgaaaaagtagcggcagatttacaagatgcagagaacgttttgaatcatggttttattgaccatattgttagacgctcacaggaaaaaagaatcattgaatggttaatcaaggtaggtggctatcatgactaaaaatgcaattgatatagttaaagctgcaagagatgaaagtcatatctctggtcatgagatacgcaaacttctttttcccgatttttttgaattgcatggtgatcggtgtggtactgatgatcctgctatagtaggtgggctagctacttttaatcaagagccagtaacagtaattacaactagcagaggacatttacttaaagaaagaattcaaaaacactttgggcagcctgaaccaggtggttatcgtaaagttctgcgtttaatccaagatgcaggtaagtttaggcgacctgtttttttgtttgttgatacagctggcgcttatcctggtaaaagtgcggaagaaaacggccaaggacaggcaattgcacaaaatttgcttaaagttagtcaaatacctactcctattattacggtcatgtatggagaaggcggctctggtggtgctttagcgcttgcctgcggagatgaagtttggatgttggaaaatagtatttattctgttttatcgccagagggctttgcttctattttgtggaaagatgtaaaaagagcaagtgaagcggcggaagtcatgaaattgacgcccgatgatttactcaagatgaatgtgatcgaaggtatcatcgccgaaccggataatcatcaagaggtttgtcaaaatatagcagaaaagctgcaaagtgagataaacaaattaagtaaattatccgaggcagaattgcttgctaagcgatacgaaaggtttagaaagttttagaggtaaaaaatgagtggatttttagcaggaaagaaaatcttggtaatgggtgttgccaataatcggtctattgcatggggatgcgctcaagcaatggaaaaacagggagcaaaaatcatttatacttaccaaaatgagcgattaaagaaatttattagcaaattagttactgatgaagattgcctgattgaatgcgatgtggcaagtgatgagagtattggacaggcttttggtttgattcaatctcgttttggcaaaattgatggcattgttcacgcgattgcatttgctgagaaagaagaattaggtggctcaattttaaattccacaagagagggattcagccaagcagttgatatttcagcttattctttcttggctgctgcaaaagctggaatcaaaatcttaaataatcctgcaagccttgttactttaacctatatgggatcagaacgtgccttgcctaattacaatactatggggattgctaaggccgctttggaatcggaaatgcggtacttagcgcgagacctgggtgaaaaaggtgttcgggtaaatgctatttcagcaggagctatgcgcactctggctgtctcaggaatccagggtcatgcatcattattgaagatttctaagagtaagactgttgatggtgttaatgtgacacaagaagaggtaggtaatacctgtgcttttttgatgagcgatttggctagtgggattactggagatgtaatttttgtagacaaaggtgtacatttacgctaatgcaaatttacaaatatcgaaaggttacttcaacacaagatcttgcaaaaaaatatttagcaaataaagctcaagaaattgctgcatttatagcacaggaacagacggcaggttatggcaagaggggacgctccttttattcaccagctaaaacaggtatttatttaagtattgcgcttcctaattttaagtttaaattagagcatgcaggcttattaacaatagctattggggtagcggtagttcatatactacaagaacaatttccttcgtatgaatttcgtttaaaatgggttaatgacatttatttaaatgataaaaaagtagctggtattctaaccgaaaaaataggattaggtttggtaataggaataggggtgaatatttttacggcatctttcccaaaaaatatctcaaatcatgtcggcagtattgtacaagctgattatgcttttgagaatatgaatgagcagttaattcgagctgttgtgcaggctgctaatacatatcaaaataataaatttttagacgagtatcgcaaaatttcttatctgaaaagtaaagttataactttgaaaataaatcattattatgtaacaggtcgagtagtgacaattgatgatcaaggacggttagttattagttgtcgaaattctacacgttgctattcaagtggtgaagttattaaggtggaattagaacccggatttaagggtaaacagtaaaatagtacaaaaaaagacttgagaagtaatttttctcaagtcttttagtttgtcttaatttaggttaattaaaacttgttcttgtccaaagcaactggagaatctggcttttcaccattgatcatcttcaagttgttgtcaaatgccttaacaaccatgttacgtacagcgtgggtggtgtagaaggcggtgtgtggagttaccaaaacgtttggacgatcaattaagtcagctaaacgcttgtctgggaattctttaccttcccaatcttcgttaaatacaccaacttcgtcttcgtaagtatccataacaaagccaaagatcttacctgagtccaaaccgcggataacagcgtcagtgtcaacaagtggaccacgtgagcagtttacaattacaacgccatctttcatcttggcaattgattcgtaattgatcatgtgtacatttgctggaacatctggtacgtgaagtgaaattacatcagcttgcttgtacaagtcgtcaagtgagtcaacgtagtaacccttcttttcgagttctgggttcttgaagatatcgtaagcaatgacctttgcgccgaaaccttccataattctcataaatacttgaccaatgtgaccagtacctacaacaccaacaacttggtcacgaacttcacgaccaatagtaggtgcccaacgtaagtcgcgcttagccatcttttcgtccatacgcttgtcttgacgtaatacacgagcagcttggattgcagcatgttcagcaatagcgtcaggagagtatacaggaacgttagtaatttcaaagccaagttccttagccttgtccatgtcgatgttgtcgacaccaacgttacgtaatgacatcttagttacgccagcgtctgccaatgcttgaagagtttctggggtgtagtctaattgttggtaaacaacaacaccgtcagcacccttagctaacttagcagtttcaggagtcaaaagcttatcagtgtaatctacatcgatatccttgtgagcatccttccattcgtttaagaatggttcttcgtctttacgaatagcgtaagcaaaaatctttgtcataaatttaacctccgtaaaatttattagtatgaccagtcctcattatacgcttttacttgctcaacaaaacacaaaagaaccatttttttgtatagattttaagaaaaataaaagtcaagttttactctgagcaaaaaagttgcaattttttcaaaaaaagtttatagcctaaaaattgcaactattattaactgttacctaatctcaatcccatagatatgaaaattatttttgtatatagcaatattagttaaaggtagtatatggatttgtataagagacgcattttcgttatataacccaggttatataatggactttaagtagagaaacaaacatagcggaggaaaattgaatatgcattttaaaggagaaagccaacagcatttcagcctaagaaagctgacaattggtgttgcttctgtaataatcgggaccacctttatgttttttggtggtcatgctgttcatgcagatgatttaagtagagatgctgagcaaaccagctcagttgttcaaaaacagagtagtgagaaaatagatgtagatgcagtcaaagaagctgataatgtttcaaatcaaagacaagacttacccagacggtactaagagtaccgcaactgttcctgtaactgtcattgcaccaaatgtaccagacgttatctacgtaccaaagggtgacaagtttccagacccaagtactgtagttactaactctaacgatatcaaggacaagattcctgacacgacttacacttggaaaactactccagatactccaaatactaaagtagtaattaactataaggctaataatcctggtactccagataccccagttactccaccagtggatccaggcgataatccagcaaccccagttaccccgcctgtaaagccagagcagaagccaacaacaccaactcctcatgctactaagacaccagcaaaggataatggtggcaagaagacagtagctagtgagcaaaaatctactttgccacaaacggggaagaaggataacgttgctttgactgctatcggtgtagctattgcagctgctggaagcttattaggattagcagatagcaagaagcatagatcttaatttgtaatatctaatttctgtttactaagaagcaagttgactcagataggagctagcttgcttttttgtctaaaagtttaaggatttctaaagacaaaaagcaaatagtgacgcattgtcataaagctgatattatatactcataacaaaaatacaacgcatcaaatagagatgaattgtaagaaggtaacaaatcttctaattccttattaatacatcctattgggcctttattaattcatacattgggtattgctttttgctggttgtcccctatgcaaccgcgaaagttaagattgataataagtccatcccctttttgcgaaggtaaagagtcaagaccccctgcaacatctcttgcgttgaatcttttgttaatcttgataatttatcttcgcaacattagtgatgagtaggctaatgtaaaaaaatctcgttattctcattcaacacaactcccttaaaagggctggtttagaaaagtcatctaaatcagtcctttttctttttttcgttataattaaacttgagaactaaaacaaaggggaagaaaaatgatcttaatttcatggaatatcgattcattaaatgcagctctgactggtacttcagctagggcggaagaaacgcggcaagttttaactaaaattcatgatgccaatccagatattattgcgattcaagaaactaagctgcgtgcaactgggccaactaaaaaacataaagaagtgttggctgaaaagttccctgagtatgactatgtttggcgctcttcagaagaaccagctagaaaaggctatgctggtacaatgtatctttataagaaaggattaactcctgcagtgtctgagccgattattggcgcccctgagccgatggatcatgagggacggataatcacactggaatttgataaatgctttgtcacccaggtttatacgccaaattcaggcagtggtttaaagcgactagctgaacgtcaagtttgggaccaaaagtatattgaatatctgcaaaaattagatgaaaaaaagccagttttagctagtggtgattacaactgtgctcataccgagattgacttgaagcatcccgaaaataatcatcactcagcaggttttactgatgaagaaagagtcgactttaccaatttgctcaatgctggctttaccgatacctttagaaaagttcatggtgagattactggcgtatattcttggtgggctcaacgtgtcagaaccgctaaggctaacaactctggctggagaattgattactggctagtaagcaatcgcattgctgataaggtggtccgctcagagatgatcgatacaggcaaacgagcagaccactgcccaattttgcttgaaataaatctttaaattgaagcaagccctagtataatttctttttgaaatgtttttattttgaaaaagaagtaggggttgaaattctttgaataacgagaaaaaagaagattgggctttggagcaggatctgaagtacaatcgtctgacagcatttaagctattcgcgatgactagttcaatggttatttccgttgatgaactcgcaccatttggtaaaactggagcaacggcactgttttacttgttaattgctggaatcgcttggtttatcccgattacgcaaatggctggagaaatggcctcaattgatggctgggaaaaaggcggaatcttcacttgggtgaaaggatctcttggagacaaaacaggctggacagcaatgttttatcaatggattcatattactgttggtatggatacgatgatgtatgtgatcattggggcattgtctatcacatttgggacaccttggttcaacaccacgccaatcgtacgcttcattttaatgatggttattctgtggggagcaacagcgattcaggtaattggtgttagaaagattggtcgaatcgctgaatggctgtttattctggggattgcgacaccagtaattttattgattatttcattcttcgtatatgtgattcaggggcatcccttgcatatgacgattaactggaatactgtaattccacataaattgaatggtaatacattagttgcctttgtcccatttatgttggccttttgtggtggggaagcttctgcaccgcacgttaaaaacttggaccacatcaagtcatactcaaaagttatgcttggcttagccgttactgcaatctgcttcgacttgctaggtagtatggcaattggaatgactgtgcctaaggatcaaatagagaacagtacaggctttgtttatacctatggcaagctgttaacgtcaatcgggctacctggtgatctgttgcaaaaaattgtgggtataatgttagcctgcggtattattggtgagctaggcaactggattgctggtcctaatcagggaatgtatgaagcggctaaagagggctatatgcctaagttttttgctaaaaccactaagcacggcgtgccattaagaattatggttttacaatcaagtatcgttaccatttctgcattattgattacttttaccagtggtgccgatgcagattttgcgtttaacgtttcattggccgcaacgacggcgcaatatctcatggtttatatgattatgttgattgcttacatggttttgaaaagaaagcatgaagattatcaccgtatgtattacatgagcaagaaccctaatttgagtattgcaattgcggtgcttgcattaatcatcacggttatagctttctttgtaacttttgttccagcacaaggcacgccaagcaatttgcgtcacgtttatgtttggaccttaatcggcatgtgtgccattgtgtcgattttgccacttattttgtatcgctggcatgaaaaatggcaatcacaatagaattaagaagcattcgtttttcaagacggatgcttttttagtagaatttgagagaggtgaataaaatggcggatgcgatgagggatgcaatattaaatggttttgttgatcaaaattatttaggaagtgaagaattaggtcctaaaatattagctaataatcagcaagagagaatctggcagaatttgcgccaggaattgtatagttgcaagtcctttacttgggcggttgcgtttattacgcaagacatgctagttccgtttaaggtgataatggcagatttagcgaaaaatggaattagtggcacgattattactggtgattacttgggttttaacaatccgcgtgtttttacggaattacaaaagattcctaatttagaagttcgtattgctaataaggcaggtttccatactaaaggatatttatttgatcatgaaaactatcaaactgtgattattggcagtgctaattttacacgttcagctctgctggctaactatgagtgggctttgaaagtaagttcaaaaaagcaagcagatttaacagctcaattagtggataaaattgcagatttgaaacaggatagttttgttttaaattcagcctggctaacagattatcgtaaaaattgggtaaagcctgagcgagttgctactgatcggcatcagacaaaaattttaccaaataaaatgcaaaaagcggctttaaaacagatagaagcactagttacaagtggtgaaaaacgagggctagtagtgtcagccacaggaacggggaaaacttatttaggtgcttttgctgttaagaaatatcagccgcggcgttttttatacattgtgcatcgtgagcaaattgctaaaaagtcattagaaagtttttatcgtgtaatcggtggaccaagatcggattatggcttattaacgggaaataggcacaatttacaggccaagtatttatttgcgacggtacaaacgataagtcaacctgagatgctggctaattttaatagcgatgaatttgattatatcttgattgatgaagcacacagggcagctgcaccttcatatcagcgccttttacattattttaagcccaatttttggttaggaatgacggctacgcctgaacgaatggatgagcaaaatgtttaccagatttttgactacaatttggcatatgaaattcgtttgcgggatgcactggaagagaagatgctggcgccatttcattatgtgggtgtccaggattatgaagcagacggagtagtgattgatgaaacaacagatttacgctacctagcttctacatctcgagtagactatgttttaaaggaattagactattacggctattgtggaacaaaggctaaaggcttggttttctgcagtcgacaggatgaagcacgtgaattagctcggctttttagtcaaaaaggacatcccgctgtagcattgaccaatgaggataatgaaaaaagacgtaatgaagtggttgcgtctttagttaaaggtgagattgagtatattgtagcggttgacttgtttaacgaaggaatcgacatccctgccttgaatcaaattgtgatgttacgcaacacacagtcgagcatagtgtttatccagcagttaggccgggggcttcgtaaatatcctggcaaagattttaccgttgtgctagattttatcggcaattataaaaacaattacatgattccgttggcactgaatcaggatacttctcgaagcaaagatcaagctaaacgagaaacgcgtctgccaagctttattgatgtttcaacgattaactttagtaaaattgccagtgaaaaaattttggcttcgcttgatagtgtcaagcttgatgggatgcgtgaattgcggcagagttaccatgatctcaagaacaaactagggcgtgtaccgctactatttgatttttatcaatatggctcagttgcaccgattgtttttgcacaaaatcatggcttggcaagctatgctgactttttgggtaaaatgggcgaagacgttaatttatcaaaatatgaaaatgaagtgctgtcttttgtgactaaggaattacttaatggtaaaagaattcacgagttacttttgttagagatgctacttgaacaagatattgttaagcaagaagattatctagctcaattgaaacgacaccatgcttatgtaaatgatgaattgttagcttctgttgatgcgattttatcgctagatttttttgatattaagcagggaaagactaccaaaaaagcacaatatggtaaattgccgttagttgaacgtagcaatttatttgactatcaattgaatggttctctacgctctgccctagatcaacatgattttaagaatttatttgttgatgctattaaaactggtttggccttaaatcaggaatatgataatcagcgtcaatttactttatatcagcaatatgatcgtaaggacgcttgtcgactcttgaactggcctaaggatgtttcggccccgatgtatggctatcgtgttggtgagcaggacacaccaatcttcatcacttatcataaagatgatcatgaaaagcggaatgctctgtatcgtaatacattggctgatgggcgcagtttgcgctggtatactcgggtaccacggcatttagattctgatgaggtacagcgtttgcttaatacgcgagggatgaatttgcatatatttgttaaaagaagcgatgcagatggtaagcagttcttttatttaggcaaggcaaagattcaagctgattctgttcgcgaagaattgctcggtgttaagaaaaagccagctgtagggatgaacttaatgttgaaacatccactgagtgagtcaatgcatgagttattatttgaatagaccaaaaaagcctttccgcttaggaaaagcttttttaattgccgctaatattaattagatcttggtcatcttggttattatccttatcaaacattctaggcttgatgtgatctagaatcttagtcccgatatttttctgagcagtttcatcaccgctaacctggtttaaaaacataattattccatatcgattatctgtagtcattttgatccaattaccaaaatgagtgttgcttaagctaccataagcagatttagtatggtcatcatctaaatgaagccctccagaataattagtggttgcacttttaagatgagttaagtaatagaaatcggatttgcttaagatactaccattggttaagccaagctggatcttgtaataatccattggggtagtgaacatattgcctgcgcctggaagctgggaggcaagagtctttttaacgtattcagcgtcttggtaatttttaccattattccagacgtaagagataggatcggttttccaactaggaatatcctgataaaggaatgtattagcaagccctaatttgttaatgatgcgattattgaaattgttttcgtaggattgtccgctgattttaataataattccggctaataaaagatagttggtattattgtagaagtaggttcctggtgtcccttgagtgccgttattagtattatcaatagcccaattgatggcgtcattctcacttaaaacttttccgcgatccaattcagtattggttgcttgaatgccagaagtatgggtcattaactgtccaatagtaatattatcggcgtttttaagattagggtaccaacgtgaaattttggtgttttgcgtaaatttttgactagtgtgccagttttcattcatcagctgaattatcattgctgctgtaacaactttttgcaaagaagcagttggataaactacgttgtcgttcccattaccaacttttttaccgtaccaagcgtagccatagctgatttgttgcggctgaccgtttttgataatgacgatactaccgcgagtattgttttgagccaaagtattgcggacaaaatttcgcatttcggttttaaagtatgaactggcttgaacttgtggtggttcagtgatcgcaaatgcaggaactgtcgttagcagcgcagcggtagctagtccaataattgattttttcaaaaattaaaaggcctcccttaaaaagtggtttgtttacattttagcgcgttctttgcatcggacaaactattatcttggtgaaaagacgtatttttagctagcttgttgaaaaagtgcggctaattttgctctgagtgcgggatcatgagcgtataaataggtaccgcggattcctcgcttgaatagaacgttgagtgaattcatgaccatcttctcttcatattctattttttcttttgagttggttagatcattacgctttttgaacatctcaacatctgtaattttgtctaaattaactttaagttgattggtgcggggaatcaggctgattggtggaccgataatgatgccagcataatttaggtcaaaaccttggcaagtatagatagaaccaacttcattgattgttgtaggaatttctgcccaaggagttgatgtgtagttgtattgatcccatggcagcataaatttcccttctttaatgtaatgtttgccaccatcaagagtagatggatagccggaagttgaaagaattcttgccaggccgtctgtttgatttctcttgacgatttcttgccgcattttttctgcatcagtaaaaatacgaaagtcgtagttgtgccacatttctttttttaagggcattaatttattatgtgtaaaaaagttaaaccattctattagactatctggtgccatcattctaaattgatgatgtagttgatagtcttcgtggggataatgatgagtaattgcttcaagtcgcttacgtgtccagaagcttttcattcgtaaaacttggttttcatcaaataccaaaatgataacttttgaccgcttaataacctcctctaattggttatcgtgataaaagttgttgtagtgatcaggctgagataagagcaagtgtgcttcatcaatgacgacaacatcagcactggtttgttttttgtccatctgattaataaatgaagttggccgcatataatttttcttatatagttctttaatcggcccagcaatctgcttatagacttttagcagttcagggtgatttactaaaaagtagttttgagttttatacagttggctgcctgtttggtggtttaatttttgcaactgatcaaaaagggcagaaagcactacacttttaccagtacctgcttcaccataaatagtgaaaacagcaggatgatttttattgctgcaatgtgtaatcgaaaaatgtaaaattttttgtacgagaagtgattgctcttggttgagctgatggtaaggagagagtttaaaacttgcttgattattcaatatttattcacctcgttttcaattataatgaatagaaataataatgataaaggaagaaaacatgactgcacaaaaaataattcacaatcggctatttttaagacaaaaatctgatttagctggcaaaaatgatttacaagttgcgataaacttgcgtgatacgctactagctaatcgtgggaaagctgcggggctggctgcaaatatgattggtcagactaaacaaattattgcgttttatgctggcccgcttccatttgtaatgctgaatccgcgtattattcaaaaaaagcagatgtatcttgctagtgagggatgtctgtcactagaaggcgagcgtaatgttcagcgctatgaagaaattactgttacttatcagaatatggagttagaaacagtaacgcaaacttttggtgactttatagctgaaacgattcagcatgaaattgatcattgcaatggaattctgatttgaatagtagaatatttacgtgattttgcaaaaaaagtaaaaaaatttaaattaattttgcatggtttcagggatgaaaacccacaattttcgaataattagatttgatagaataaaatactttttaatttaatgcaaagataaagaaaaatatattacaacactacctagtgtatcgtgaagaacccgaacgaagagcaagacttgccaaagcggagaaaataaggtaaattaataaagtcgcttcgagagatgcgacgagagcttaaaaacagacatgcaaggaaagaaaacaaataaaaagaaaaaagtacttgcaaagaagtaaataagctggtaatatatttaaatgtcgtcaggtgaaagcagaaaaagcttgagtaagacgaaaaaacaaatcaaaaaagttcttgacaaagaaatgatggtttgataaaatataaaagctgtctgctttgcaaaaaaagcaagacagaggtagtactttgaaaactgaacaaagtttcgctaaaagtgtgcgggtgtaaaaacccaaacaagaagcgaagtcaattcgcaagcaataaatttgagacaaagatcttaaataaggaatgagcaatcattcaaactttttaaaatgagagtttgatcctggctcaggacgaacgctggcggcgtgcctaatacatgcaagtcgagcgagcggaactaacagatttacctcggtaatgacgttaggaaagcgagcggcggatgggtgagtaacacgtggggaacctgccccatagtctgggataccacttggaaacaggtgctaataccggataagaaagcagatcgcatgatcagcttttaaaaggcggcgtaagctgtcgctatgggatggccccgcggtgcattagctagttggtaaggtaaaggcttaccaaggcgatgatgcatagccgagttgagagactgatcggccacattgggactgagacacggcccaaactcctacgggaggcagcagtagggaatcttccacaatggacgcaagtctgatggagcaacgccgcgtgagtgaagaaggttttcggatcgtaaagctctgttgttggtgaagaaggatagaggtagtaactggcctttatttgacggtaatcaaccagaaagtcacggctaactacgtgccagcagccgcggtaatacgtaggtggcaagcgttgtccggatttattgggcgtaaagcgagcgcaggcggaagaataagtctgatgtgaaagccctcggcttaaccgaggaactgcatcggaaactgtttttcttgagtgcagaagaggagagtggaactccatgtgtagcggtggaatgcgtagatatatggaagaacaccagtggcgaaggcggctctctggtctgcaactgacgctgaggctcgaaagcatgggtagcgaacaggattagataccctggtagtccatgccgtaaacgatgagtgctaagtgttgggaggtttccgcctctcagtgctgcagctaacgcattaagcactccgcctggggagtacgaccgcaaggttgaaactcaaaggaattgacgggggcccgcacaagcggtggagcatgtggtttaattcgaagcaacgcgaagaaccttaccaggtcttgacatctagtgccatttgtagagatacaaagttcccttcggggacgctaagacaggtggtgcatggctgtcgtcagctcgtgtcgtgagatgttgggttaagtcccgcaacgagcgcaacccttgttattagttgccagcattaagttgggcactctaatgagactgccggtgacaaaccggaggaaggtggggatgacgtcaagtcatcatgccccttatgacctgggctacacacgtgctacaatgggcagtacaacgagaagcgagcctgcgaaggcaagcgaatctctgaaagctgttctcagttcggactgcagtctgcaactcgactgcacgaagctggaatcgctagtaatcgcggatcagcacgccgcggtgaatacgttcccgggccttgtacacaccgcccgtcacaccatgggagtctgcaatgcccaaagccggtggcctaaccttcgggaaggagccgtctaaggcagggcagatgactggggtgaagtcgtaacaaggtagccgtaggagaacctgcggctggatcacctcctttctaaggaagcgaaggatatggagagcaggaatgctaagagaagtatccagagcaagcggaagcacactgagaaactttgtttagttttgagggtagtacctcaaaaagagctagtacattgaaaactgaatataatccaagcaaaaaaccgagacaatcaaagagaacagattgtagagcgaccgagaagagaattcttgagtaaggtcaagcagaaaagggcgcacggtgaatgcctaggcactaacagccgaagaaggacgtgacgaactacgaaaagcttcggggagcggtaagtacgcagtgatccggagatatccgaatgggggaacccaatgcagagatgcattattgattagtgaatagatagctaatcaaaggaagacgcagtgaactgaaacatctaagtagctgcaggaagagaaagaaagatcgatttccttagtagcggcgagcgaagaggaaagagcccaaaccaagtgatttatcatttggggttgtaggactgcgacgtggcagtgtaagagatagttgaattatctgggaaggtaagccagagagggtgagagccccgtaagcgaaatctcaagcacgcctagcagaatcctgagtaggccgggacacgaggaatcccggttgaaaccgcgaggaccatctcgcaaggctaaatactagttagtgaccgatagtgaaccagtaccgtgagggaaaggtgaaaagaaccccggaaggggagtgaaaaagaacctgaaaccgtgtgtctacaagtagtcaaagcacattaaagtgcaatggcgtgccttttgtagaatgaaccggcgagttacgttatctagcgaggttaagtcagaaaagacggagccggagcgaaagcgagtcttaatagggcgaaaagttaggtgacgtagacccgaaaccaagtgacctacccatgaccaggctgaaggtgtggtaaaacgcactggagggccgaacccacgtaagttaaaaattgcggggatgagttgtgggtagcggtgaaattccaaacgaacttggagatagctggttctctccgaaatagctttagggctagcctcgtggagaggataatggaggtagagctctgtttggactaggggcccgtcaggggttactgaatccagataaactacgaattccagatatccatacacgggagtcagactgcgagtgataagatccgtagtcgaaagggaaacagcccagatcaccagttaaggtccccaaatctatgctaagtggaaaaggatgtggagttgcgtagacaactaggacgttggctcagaagcagccatcattcaaagagtgcgtaatagctcactagtcgagtggcgctgcgccgaaaatttaccggggctaagcatagtaccgaaactgtggatgtgttttaaagagcacgtggtaggagagcgttctaagagcggagaagttgaatcgagaggatcaatggagcgcttagaagtgagaatgccggtatgagtagcgaaagataggtgagaatcctatccgccgaaagactaaggtttcctggggcaggctcgtccgcccagggtaagtcgggacctaaggcaaggccgagaggcgtagtcgatggataacaggtagagattcctgtactgtgtcaaatcgttaagagcgaagggagggacgcaggaggtgaagcacgcatcgcgatggaacgatgttcaagcaacaagtgcggttaagagtcaaatgcttctaaccagcaacacgagttgtgaagaggagtgaattaaaagtagcgaaggtgtggtaatcacactgccaagaaaagcttctagccagagatgacatacccgtaccgcaaaccgacacaggtagtcgagtggagaacactaaggtgagcgagagaactctcgttaaggaactcggcaaaatgaccccgtaacttcggaagaaggggtgctagccaagagattggttagccgcagtgaataggcccaaacaactgtttatcaaaaacacaggtctctgcaaaatcgtaagatgacgtatagaggctgacacctgcccggtgctggaaggttaagaggagagcttagcgtaagcgaaggtttgaattgaagccccagtaaacggcggccgtaactataacggtcctaaggtagcgaaattccttgtcgggtaagttccgacctgcacgaaaggtgtaatgatttgggcactgtctcaacgagagactcggtgaaattataatacccgtgaagatgcgggttacccgcgacaggacggaaagaccccatggagcttcactgtagcttgatattgagtatcttttaaacatgtacaggataggtaggagccagagaagataggacgctagtcttattggaggcaatgttgggatactacccttgtttgaaggatgctctaacctcgacctgtaagccaggccagggacagtgtcaggtgggcagtttgactggggcggtcgcctcctaaagtgtaacggaggcgctcaaaggttccctcagaatggttggaaatcattcgcagagtgtaaaggtataagggagcttgactgcgagagagacaactcgagcaggtaggaaactaggacttagtgatctggtggtaccgtatggaagggccatcactcaacggataaaagctaccctggggataacaggcttatctcccccaagagttcacatcgacggggaggtttggcacctcgatgtcggctcgtcgcatcctggggctgaagtcggtcccaagggttgggctgttcgcccattaaagcggcacgcgagctgggttcagaacgtcgtgagacagttcggtccctatccgtcgtgggcgtaggaaatttgagaggagctgtccttagtacgagaggaccgggatggacgcaccgctggtgtaccagttgttccgccaggagcatcgctgggtagctatgtgcggaagggataagcgctgaaagcatctaagtgcgaagcccccctcaagatgagatttcctttgcgtaagcagtaagacacctcagagacgatgaggtagataggctgggagtggaagtcctgtgaaggatggagcggaccagtactaatcagtcgaggacttgaccaaagcgaagcaaactggaaggttttttgcgagaaggattatgtttagttttgagtgtaaaagctcaaaagagtacggtggcgaaagcaagaaggatacacctgttcccatgccgaacacagaagttaagcttcttaacgccgaaagtagttggtgggcaactgcctgcgaggaaaggaagctgccgtgctcttttttaatattccggcttagctcagttggtagagcgcttgactgttaatcaagatgtcgtcagttcgagtctgacagccggagtaaaggggagaaggaagcggaagacttcttttttgtgccttttgggtatgttaaaaggctaattaggctaagcaagcatgacttgagggtcaaatttaatataatcattaatagaagacatagtaaaattcctaacaagcttaattgaattgattacggaggctatgctctctttttaagtgcataaaaatcttatagagagatacgcgtggtgctagttaaatcgttctagacaataagccaaattataagctaaaattgcaatttccaaccggctttgaaagcctatcagactacgtgctcgattgttctcggcattgtaataggtcagaagcgaaaagtcgctttcaattgttctgcgaatagccatcaattgatgatcattgtgctttttagctcctgtcatatttttacgatatggtgtccaaagttcataacccatttgttttagctgttgatgcagttctttgcctaaatagccttcgtcgccaagaagatagtaattagatggatgggtattttccatcagttcaactgtctccctggcatcatgaactgatgcttttgttacgacataatcaagaatgtaaccgtcatcgctaacaatgacatgaactttgaaaccatagaagtaaattttcttggtggccttataaccaatgttggcataaccgcgaaaaattttagcacgatagttgcgaattggttggcaaacaggtaccggaaagctgtcaatgatcaagaactgtccattcaggtcaacctttttattcatttcttgccgtatctgataaatcaattgcaatagctgacgtgaacgtcgattaaaacgtgagtgtgataaacaattgaaacattcacagaatcttctttgtgattcaattcctgtcttagcttgccagataagtaaagccaaaatcagactgtccgtagttttaatttgatcaatatttcgccgatgagtaaactcagccggtgcatacaaacgataccagtgccgacaaattatcactaaatctttaaaactaacttgtaaatggtggctaaaacgcttaagcttaaggcagttcaatcagatcagactcttttctattattactatttacaagtcgagtctaacaagattggacttttttattaactaaaacgatttaactagcaccacgcgtagatagattattataaatacgcgtggtgctagttaaatcgttctaggcaatatgccatattataagctaaaatggctatttctagccgctgctgaaaaccagctaagcaaagaaaagtcgctctcaattgttcttctaattgccatcagttgatgatcgttatgctttttagcgcctttcatgtttcttcgatatggtgtccaaaggacatagcccataccttttaactcggcagttaagtcttttcctaagtagccttcatcgcctaaaagataatggttaattggatgagcattaatcatcaattctgtcgtttctttggcatcatgcactgatgctttagttcaagtacatagccatcatcgcttactagcgcgtgaaccttgaagccgtaataatagatttttttagtggctttctagccgatatcagctatgccacgaaagatcttgacgcgatagttgcggataggctgacaaactgggaaactgtcaataattaagaattctccagctgtttttacttcttgattccaatcttgacggatacagcgcattaaaggcaaaagcattcgtgcccgacgattaaagcgagaatgagacaaaccgacaaagaatttacaaaatcttctttgagattcgataccaatttcagtttgccaaataagcatcgctaagatggagctgtcagaaattttaacctgatcaacatttttacggtgcttcaattcatcaggagcacaaagcttgtacaaagaacgacaaattacatttaaccgagcaaagctaacttgtaaatggtgagaaaaacgattaagcttgagatagttcaattagatcggactcttttctatttaatttaagttacaacttgagtctaatccgattggacttttttattaactagcaccacgcgtttataaatattcaacgacagtaaaattaggtaagcaatctatatctaggaatctgttggggttctgattgtagtaggctaattatacaaaaatgagttaacaaaattctgatcagaattagtacggttaagattgaaaaaatagctggtaattattactgtatctctttgtaattaggtagcaatgctattttttacttctaaaatataattaaaccggtcagacaattcgtattgatctgaatttggataaacagttataacaaaactatgtgtgcaaagcagatgacagggacttttaattgatctcgtatgttggagcgcgctgtgttgactatttgttctaagtgaacagatgataagtatgcctctatctaagtaccaagatctaggaaattcattctgaagtagttaatatgtgtcaatatgtcgcacaaaggtaactatgaattacagcaacataagagaaatttgaaaaatagtttttaaattgtggcttgttattagtgaaaatgataaattaaatattattttggcagaaaatacagcttaataacaaaaaataaaaatattttttgcttacctttaaaaatatagttcgagatttataaagtttttaacgagttaaagtgatatttctataattgaaagcagattctactaatgtaattactataatcagaataaatatttcataaaaatacatagaacccgaacgaagagcaagacttgccaaagcggagaaaataaggtaaattaataaagtcgcttcgagagatgcgacgagagcttaaaaacagacatgcaaggaaagaaaacaaataaaaagaaaaaagtacttgcaaagaagtaaataagctggtaatatatttaaatgtcgtcaggtgaaagcagaaaaagcttgagtaagacgaaaaaacaaatcaaaaaagttcttgacaaagaaatgatggtttgataaaatataaaagctgtctgctttgcaaaaaaagcaagacagaggtagtactttgaaaactgaacaaagtttcgctaaaagtgtgcgggtgtaaaaacccaaacaagaagcgaagtcaattcgcaagcaataaatttgagacaaagatcttaaataaggaatgagcaatcattcaaactttttaaaatgagagtttgatcctggctcaggacgaacgctggcggcgtgcctaatacatgcaagtcgagcgagcggaactaacagatttacctcggtaatgacgttaggaaagcgagcggcggatgggtgagtaacacgtggggaacctgccccatagtctgggataccacttggaaacaggtgctaataccggataagaaagcagatcgcatgatcagcttttaaaaggcggcgtaagctgtcgctatgggatggccccgcggtgcattagctagttggtaaggtaaaggcttaccaaggcgatgatgcatagccgagttgagagactgatcggccacattgggactgagacacggcccaaactcctacgggaggcagcagtagggaatcttccacaatggacgcaagtctgatggagcaacgccgcgtgagtgaagaaggttttcggatcgtaaagctctgttgttggtgaagaaggatagaggtagtaactggcctttatttgacggtaatcaaccagaaagtcacggctaactacgtgccagcagccgcggtaatacgtaggtggcaagcgttgtccggatttattgggcgtaaagcgagcgcaggcggaagaataagtctgatgtgaaagccctcggcttaaccgaggaactgcatcggaaactgtttttcttgagtgcagaagaggagagtggaactccatgtgtagcggtggaatgcgtagatatatggaagaacaccagtggcgaaggcggctctctggtctgcaactgacgctgaggctcgaaagcatgggtagcgaacaggattagataccctggtagtccatgccgtaaacgatgagtgctaagtgttgggaggtttccgcctctcagtgctgcagctaacgcattaagcactccgcctggggagtacgaccgcaaggttgaaactcaaaggaattgacgggggcccgcacaagcggtggagcatgtggtttaattcgaagcaacgcgaagaaccttaccaggtcttgacatctagtgccatttgtagagatacaaagttcccttcggggacgctaagacaggtggtgcatggctgtcgtcagctcgtgtcgtgagatgttgggttaagtcccgcaacgagcgcaacccttgttattagttgccagcattaagttgggcactctaatgagactgccggtgacaaaccggaggaaggtggggatgacgtcaagtcatcatgccccttatgacctgggctacacacgtgctacaatgggcagtacaacgagaagcgagcctgcgaaggcaagcgaatctctgaaagctgttctcagttcggactgcagtctgcaactcgactgcacgaagctggaatcgctagtaatcgcggatcagcacgccgcggtgaatacgttcccgggccttgtacacaccgcccgtcacaccatgggagtctgcaatgcccaaagccggtggcctaaccttcgggaaggagccgtctaaggcagggcagatgactggggtgaagtcgtaacaaggtagccgtaggagaacctgcggctggatcacctcctttctaaggaagcgaaggatatggagagcaggaatgctaagagaagtatccagagcaagcggaagcacactgagaaactttgtttagttttgagggtagtacctcaaagatttgaaaaacgccaagcgttagtcgggcctatagctcagctggtttagagcgcacgcctgataagcgtgaggtcgatggttcaagtccatttaggcccattgacataacgaagaaaaagagttaaagttatgtctggccgaaaataaaatactctgggggcttagctcagttgggagagcacctgctttgcacgcaggaggtcatcggttcgaacccgttagcctccattgatccagaaaaaggatcaaagagctagtacattgaaaactgaatataatccaagcaaaaaaccgagacaatcaaagagaacagattgtagagcgaccgagaagagaattcttgagtaaggtcaagcagaaaagggcgcacggtgaatgcctaggcactaacagccgaagaaggacgtgacgaactacgaaaagcttcggggagcggtaagtacgcagtgatccggagatatccgaatgggggaacccaatgcagagatgcattattgattagtgaatagatagctaatcaaaggaagacgcagtgaactgaaacatctaagtagctgcaggaagagaaagaaagatcgatttccttagtagcggcgagcgaagaggaaagagcccaaaccaagtgatttatcatttggggttgtaggactgcgacgtggcagtgtaagagatagttgaattatctgggaaggtaagccagagagggtgagagccccgtaagcgaaatctcaagcacgcctagcagaatcctgagtaggccgggacacgaggaatcccggttgaaaccgcgaggaccatctcgcaaggctaaatactagttagtgaccgatagtgaaccagtaccgtgagggaaaggtgaaaagaaccccggaaggggagtgaaaaagaacctgaaaccgtgtgtctacaagtagtcaaagcacattaaagtgcaatggcgtgccttttgtagaatgaaccggcgagttacgttatctagcgaggttaagtcagaaaagacggagccggagcgaaagcgagtcttaatagggcgaaaagttaggtgacgtagacccgaaaccaagtgacctacccatgaccaggctgaaggtgtggtaaaacgcactggagggccgaacccacgtaagttaaaaattgcggggatgagttgtgggtagcggtgaaattccaaacgaacttggagatagctggttctctccgaaatagctttagggctagcctcgtggagaggataatggaggtagagctctgtttggactaggggcccgtcaggggttactgaatccagataaactacgaattccagatatccatacacgggagtcagactgcgagtgataagatccgtagtcgaaagggaaacagcccagatcaccagttaaggtccccaaatctatgctaagtggaaaaggatgtggagttgcgtagacaactaggacgttggctcagaagcagccatcattcaaagagtgcgtaatagctcactagtcgagtggcgctgcgccgaaaatttaccggggctaagcatagtaccgaaactgtggatgtgttttaaagagcacgtggtaggagagcgttctaagagcggagaagttgaatcgagaggatcaatggagcgcttagaagtgagaatgccggtatgagtagcgaaagataggtgagaatcctatccgccgaaagactaaggtttcctggggcaggctcgtccgcccagggtaagtcgggacctaaggcaaggccgagaggcgtagtcgatggataacaggtagagattcctgtactgtgtcaaatcgttaagagcgaaggagggacgcaggaggtgaagcacgcatcgcgatggaacgatgttcaagcaacaagtgcggttaagagtcaaatgcttctaaccagcaacacgagttgtgaagaggagtgaattaaaagtagcgaaggtgtggtaatcacactgccaagaaaagcttctagccagagatgacatacccgtaccgcaaaccgacacaggtagtcgagtggagaacactaaggtgagcgagagaactctcgttaaggaactcggcaaaatgaccccgtaacttcggaagaaggggtgctagccaagagattggttagccgcagtgaataggcccaaacaactgtttatcaaaaacacaggtctctgcaaaatcgtaagatgacgtatagaggctgacacctgcccggtgctggaaggttaagaggagagcttagcgtaagcgaaggtttgaattgaagccccagtaaacggcggccgtaactataacggtcctaaggtagcgaaattccttgtcgggtaagttccgacctgcacgaaaggtgtaatgatttgggcactgtctcaacgagagactcggtgaaattataatacccgtgaagatgcgggttacccgcgacaggacggaaagaccccatggagcttcactgtagcttgatattgagtatcttttaaacatgtacaggataggtaggagccagagaagataggacgctagtcttattggaggcaatgttgggatactacccttgtttgaaggatgctctaacctcgacctgtaagccaggccagggacagtgtcaggtgggcagtttgactggggcggtcgcctcctaaagtgtaacggaggcgctcaaaggttccctcagaatggttggaaatcattcgcagagtgtaaaggtataagggagcttgactgcgagagagacaactcgagcaggtaggaaactaggacttagtgatctggtggtaccgtatggaagggccatcactcaacggataaaagctaccctggggataacaggcttatctcccccaagagttcacatcgacggggaggtttggcacctcgatgtcggctcgtcgcatcctggggctgaagtcggtcccaagggttgggctgttcgcccattaaagcggcacgcgagctgggttcagaacgtcgtgagacagttcggtccctatccgtcgtgggcgtaggaaatttgagaggagctgtccttagtacgagaggaccgggatggacgcaccgctggtgtaccagttgttccgccaggagcatcgctgggtagctatgtgcggaagggataagcgctgaaagcatctaagtgcgaagcccccctcaagatgagatttcctttgcgtaagcagtaagacacctcagagacgatgaggtagataggctgggagtggaagtcctgtgaaggatggagcggaccagtactaatcagtcgaggacttgaccaaagcgaagcaaactggaaggttttttgcgagaaggattatgtttagttttgagtgtaaaagctcaaaagagtacggtggcgaaagcaagaaggatacacctgttcccatgccgaacacagaagttaagcttcttaacgccgaaagtagttggtgggcaactgcctgcgaggaaaggaagctgccgtgctcttttttaatattccggcttagctcagttggtagagcgcttgactgttaatcaagatgtcgtcagttcgagtctgacagccggagctagcggaatatgaaagaggcgggggccagaggcttccgcctttttgtgtgctattaaagttctataattaagcttttctaagtcttgaaatttttttaaatagggtttccaaggaactttgaggagtttgtactctgaatggtattgatggatacgttattttttctgccggaaagccacagaatggacaagtgggctgctttaaaagggcttcgtagactttgtattgcactccattgaagaatttatagaaattgttgtaaaaaacgatatttttatctttaatatcgagatcaaatttaatacaatcattaacagaggacatagcacaactcctaaatagcttaattgagacagaatatcataaatattcatcaacaggaaaaattatagagctaataaagaagttatagctttttatttgcgttatgaaatgtataaacttgttgtctttgtctctctattagactggtaaatattcaaaagtatatgttaaatttcagacattaaatacttagaaaaaaggacatatttagatggataaaaattctgatagacttacgttagtgccatatttcccgaatgaaaagcagactcttaaatggtaccaggatcctaaaatctgtaagcaggtagataatattgataccgtttatgatttaactaaattacgtcgaatgtatgaatatttgtcagtgcatgggtggtgctactatattcaatatcaagggaaattgattggtgattgtactttgctaaaagacggtgagatatcaatcgtgatttgcaaagaatatcaaaacttgcatcttggtagaaaatgtgtcgacaaattggtgcagcttgcaagaattcagaaaatgacgcaagtgaaggctcacatatatgactttaatattcaaagcaaaaaaatgtttacaagaatggggtttaaagagcaacaacctgactggtactcttatgatttatagatcaaaaatattcatgttaccaagtaattcatacaaacaatcagttggtgtgatgtcagataagcactcgtattagaaaaatgtaatcatcagtaattaaagactgtagttgaatcaaataattaactcagcgtataaaatgctgagttagacaaaaaaacaacgagcaattctctcgttgttttatggattcattttgatcaaatttttagtttatctttagttgtaaataccaacttgattaatgtgggccaattccagaactggagattgagcgaggtccaaactaacatcacagccagcatggataccattattttcgccattaagccagtgggtattattagttacgtcatagacagtaccattaaatgcaatataagctggacgtccatttttaccattgtaatttgatagagtttctttagtaaattttctcatataagaagctcctttctaataagatcttgatatattaatggtaacactttgtcaccttatagcaagagatacgaaggagtcttatgcttttcttatgaaagatgaccacgccacccagcaatatcccaatctagaaagtcataattaagctttttaccataaattttctcgtaggcagcaactttttgtcggtagtcgagttccatcatcttatgagcgttttcgttggcgtttagagaaacgtcagggaagattggtggtaaaacatggacaatatatttggtctcataaaaattaggatctttcttttcgattttaggtagatccttaatctcgacaaaagtggagactaccggtacattttgtttagccgcaaaataataggcaccacgttgtaatttgcgaggcttgcgataattccaccacatctcctgttctggataaattaaaacccaattatttttagctaaagctgcactgaggtgcttaggaaattcatttccaatatagctaggactctgaactagtggaatagtgccaacataattcattaaatagcggaaaaatcccggtagcattaggttagtatcttcaattacaattgaaagctgatggtgcatcttgttagcgagcagcttcattggtaaagaatcaacctgattgtagtggttagaagttaaaattgcgccaccaataggtaaattatttaggttctctaaacctacaaattcagttgatccagctaatgctctggataaagtaccaaataagagatgtccaatacgattattaagcttacttgaaaaagtgttacgcttattccaataatcattgaccaatttaaggcgctgatctagggacatttggggatcgccgatttctacttttgctgtgaagttacgttcattagcagctttttttatatttttaatcactgcctcacgattatcgccaaaaatcatagtgttactgcctctcgtttcttaacttttgcccaattattaggatcttgctcagttttgtcttccttagcaagcatatgatccaatttttcgcggtctgctgcacgctcgtcatcagtataattattgagttcgttctttaattcatcgaaaaactgcgtttgtttggcactatcccagaagtactgtgcatattggacattagcaaaatgccatggcttaaagaaaagattatagtgaatcagaccaggattagttaaaggttcagtgttttcatttggcatagcatcccagcgaggatttaagtgcaaaattctgccttccccgatttcatttaaatagtcttgatcaggagcaatacaatcaaaatgatacttttctaaaagtgtcataaaatggtcaataaaatgttcagcgcgaaaggccctagcattcatgacgagcatgccagagttaatgtatttcttggggtcaagtgccaggacatttttgatgtattttatcatcttgtctacatattgaattgaggagtcggtgcaagcagcaaataaattatcacccaattcggagttgtatagtttagcaagatcgtcgtttacaattgtgtcgctatcaatatagatcaccttatcatattcgggaaaaagttctggaataaagaggcgataaaaaatcgacatggtaaaaaagtcagcgcgaagaaagttttccttacgattttgaataggttgtacaagttgatcatcaatatggaaaaacttcacatgaacgtttgaactgctaagatcagacaaagctttttgatgctttgatgagagatcttgatttaaaaagtaaacagtataatccttatttggatctgtatgtttgactaaagaattaagagaaacagcagcgtatttggtaaagtcatcgctgatactgtaaaaaataggaattgtcataaaattacctttcttagattttaactgattccgtttgtttaaccttagcccaggtatttggctctttgacaatcatgtcaacttttttggccatccattctaggttagctcgggccttttgacggtcttcatcagtaaagttgtctaattgctgctttagttcatcgtaatacggcgtagttttagcaacataccagaaataatgaccatattgaacatcagcaaaatgccatggtttgaagaaaagattgtagtgcacgatcttaggatcttgaatttcaggaatgctttcatttggcatagcatcccattctttaggtaggtgataaatcttatcttcgcaaatttcattcatgtaggcttgatcagggtcaacgttatcgaaatgatatttattcattaagtaatagaatttatcaacaaactttttgtctctaaaggccttcatattaaacagaattacaccattattgatgtatttttctgcaggaaaaattccctgacattctttaatgtacttttgtaaaagtggcatgtaacgaattgataagtcgggacatgaagcaaacatgttgtcggcgatatcaatttcatacattttagcaatatcagtacagataatagtatctgcatcaagataaactgccttgtcatattgagggaacaattctggaatgaatagtcggtaaaaaattgacatagtaaagaattgagcacgcaagtagttttccttagtattgtgaattggcttaaccatgtcatcgtcaatatgaaagatttgaacatgaatattatcagttgaaagatcttctaagctctttttgtgctcatcagatatctgttggactaaaagggtaatcgtatagtccttcttggggtcagtatggtcaattaatgatttaattgaaacatatgcatatggcgtataattatcgctaattgtgtaaaaaacaggaatggttttcaaaataagatcctcctaaattatttttttaaattatttcgtaatttgagatattcgttaagcaaatcatcatattcatgtaaatgaagtacactgtgtacgcgatcaacatcccatggcttaactgtttgagtatggaaataaggccaaaacctaaagctagtagtgaaatgttgaattttggtgtttttttgcaaatgatattgctcattataacggcgtggtgctactcgcttggctacagctagcttgtttattgctgattggtcgggcaaaaacatttgcttaacctgcatcatatgccgcacctcggcaaagagatcagtttgcttaattttcttcatattcagcaacaaaacgccagaattaagataatcaaatgcgcgcttggtcttaagattgtggaagaagaagcggccccaataatcaagtacgcccactaattcgattccggtaatatcctcattgtaaaaagttgtaatatcaccgcgaatgacaatgtcatcgtctaaataaagaatgcgatcaggaatctgtggcaattggtctgcaaataaacgcaacatagcatatggcgtgaagcgagtattcatgttagcggttggcggttcctgttcaaataacttggtgcagtcaattaattcaactgtactgttaggattggctttttttactaaagaacgtaaaaaatcagccgcatgttgtgagaaagggtgatatttacgttcatcactgtgtgcctccatcgttaaaatataaagatgcaattcttgagcaccagaatttttgattaaagataaggtggaaatcaaaacgccatcttgagcattttcatctccacaaaaaagaatattcatgataaactcctattttttatttcttttgaatatattgacaatattcataatcgctattttttgcacgctgcttcattacctgccaaatttcatcgtgaagcttattttgagcttccttacggcttaaatttgtatccgggtaaaagggcccatcaatgtaaataacggcactaggccgcttgctaagccactttttatggtaggttttggtcatgacgaaactaggcgcatttaatttaactggaaagtgcatgcttgttgcatcgaacgggcgaatcttcgtgtaatagggccagacatgagcttcagggtagatgagaatctcgccctttttatccttaatcacagtttgaatggctttaattagtttgagcgattgcttcatatttttgccaacaggcagaccgccgtagcgtacaagatatttgccaatgaaggggatgccccagttagcttgattagcaatagcataaaaatttttgattggaaaaattgtgagcgaggtaaagacatcccccatgggtctagtatggttgccataaataaaatagcccccattgacttgcttaagtttttcttgaccaacgacttttacatgatcgaagaagcggaaaaccacccaaccaaaagcgcatgctaagtgacaagcggtagtggaccagattctagctccaagagaattaggtagaataacgtaattatcgggtagactgaaattttgatcgtgactatcgactacatcatcggttgttttttggtaataataaatccgtttcatcttgccctccatgatacttatgtatcctatgataccatggaaaaaagcctaattcctaagacgagaggaatgctgaaagaaaataaaaaagattcgtaatttcatgatcgaaaaatacgaatcctctgtaaaatagcataaaaaaagcaccgccttcttgcagtgcatctttcatattatgggtggccaggggatcgaaccctggacccacggattaagagtccgttgctctgccagctgagctagccacccatatttgttcatcagctcccgccgacatttaaatatattaccagtagttttataatttgacaagctttttttgaaaaaagttgaaaaataatttgaagctagcaaaaagcgcccataatggccgcttttttactaaagtttatcttgaatatgataggctgtgccttgctgatcctgcttcatgtgatctgcatagtaaacagcatagacaccgctttgatcatttttggcaatcacaatttggcgccctgttggacgttctgccttaatgatttgagcactgcggcgtgcttctttaaagtcgtgtgaagatgcgatggcatcccctggattaaaaaatacagcttcgttcattgtaaagccccctcgtacaaattctaattttattttaccaataaagccctttctaaatccaatttaagaaacaaaaaagagataagatcaacatcttatctcttacgaaaaatattatgggtggccaggggatcgaaccctggacccacggattaagagtccgttgctctgccagctgagctagccacccatgtcgttgaatcaatcaacagatattattatgctattgttgataagaaaatgcaagctttttttgaaaaaaaacaaaaatttttggctaatgttacaaaattcagtataatgtaagggcaaaggaggcattcccgatgccaaagaagattctcgtcgtcgacgatgaaaagccgatttctgatattatcaaatttaatttaactaaggaaggctttgatgtcgacaccgcctatgatggcgaagaagctgttaaaaaagttgacgaatacgacccggatctaatgattctggatttgatgttgcccaaaaaagatgggttggaagttgcgcgtgaagttcgtcaaacgcatgacatgccaattatcatggtaactgctaaagatactgaaattgataaagtcttaggactggaaatgggtgcagatgactacgtaaccaagccgttttctaaccgggaattagttgcccgtgtgaaggctaacctgcgtcgtcgtgatattgttaaaaaagcagaagctgccagccaagaagagaccgataagaatattaagatcggtaacttggtcattatgccagatgcctatattgtagaaaaaaatggtaagaagattgaacttactcaccgtgaatttgaacttctttactatttagctcaacatatgggacaagttatgactcgtgaacacctgcttcagactgtttggggttatgactacttcggtgatgtgcggactgtagacgtaacggtgcaccgtttaagagaaaagattgaagataatccaatccaacctcaaattttagttacccgtcgtggtgttggctattatgtaaaacagccgagtgaagaataataaagaaagccacagaactgttatgcaatgtcattaagttaagacattgacaattaatattagacttttaaagcactgatttaacatttaattggttaaattggtgcttttttcgtacaacaaataaggcatagcacagattctgcttttttaagctacgcgatataaataatatacagctgatttgggcttaatatttctcttgtccttgcggcctggtctaattggaatggtataatagctgatctgaataaggatccgttcaaaatcttgcgttaaagaagaagccaaatacatgctctgaataatcaagcatgattgcttgaaattgatggcatattgatacttgcaatgcttttgcggaatataggcctgtgcatcaatttgactgattgcattaaacataatcatatgggcataaatttccatttcaataaatttatcttgtttggaatggaactgtacactgcctaaagaatacttcaatttcttgaaggaggtctcaataccccaacgcagatgataaagctctttaattctttttagcggataattttttcgatcaagattggttagcacaacttcccattcttctttgcctgatttggcatcattaattctaaatttgcaggctcgaaattttattgtgcataactcgccaaaatcccagcttagatcctgggtatttttagagcgatacttaatatattggcgataatgatgctggacatggtgaatattctcactggctttatgcgtgatgtagtaatagttagaagtagttaccaggcaggaaatctcacgatcacattcttgatcaggcaatgtcgttatttctttaactccgccttgtccagccttagttcgtattatgtaatgacagttaggcaggcgattgcagttttcaatcatattgaaactagtgtagccacgatccattgttacaatatatggaccacaattcaaagctttaagcatttgaacagccgctttgcgttcatccatttctgatttaggctgaaaaatacaatcctggtaggtattattcaatagatcatataaggcattaacgtgaatttgacaatagggtttctttttatgagaagaagcttgtacaatgttattcgatttcggattccagatttgattaaagtcagagccatcaatggcaaacaaacggtagtgatgatcaaaaagttgaatattaaatagattttgattaaaaacagtcagaatatgtttaaaacaagcaggagaaagctggcttttgcgttgaacataggcagaagtactaactactttatcgttctttttagttgcatcttcgccaaaagctctaaagagttcactgtttaaattctgaccttgcatgttaattgtagttttaaggactgtcgctgcatctaaagtgcgtttcctggtaaaagcatgaggattattaataaaatcgtgaatatgatccccagtattattgataatttgatcaagacgttctagaatattcttatgaagggctttcataattaacaccatctttctggcaataattttgaaggtttaaaatatataatatataagataggcgaaaaggctggtcttttcgcctttattttatacaaaaaaagagatcgaatccaaatgattcgatctctaaaaaagcacccttaattgtcaatgtcttaacttaatgacattggtattcgttgctagcaactttttttaatgtgatggagaaaaaggcattcaacgtcagtataaactgtgatgacattgtcctgatagtcatgagcaatccagtctagaattcgaataagaatcaaactggaaatgctttggatatgcttattagaaagattactattgaatagcaatttttgcatttcacgaaaaagagcttggtcaacttgtgttcgaatttgacttgaggcaagagaatgtacatttcgatagtaggtggcattagtttcaatttctatcagtaagttgtgtgcttttttatgtaaagtacttgattggggattgttgaagcaagaattgatttcgaattgcagtacttgactaaatagatcattcaaatttttaaagttgcggtaaaaagttccgcgacagatatttgcagcttcacagaatctttgaactgaatacttgtaaacagttccttgtgataggtctttttttaagacttgtgcaaagaattggatatgtatcctgtctttcctagtttttcttcttgtagtagtgaaatacatctttatcctcccttttttatgttcattgaacatattgatatagaatataccagttactatttaatatagcaatcctttttttagataacaataatgtaatagattgtgtaagcgaaaatcccgcatggataacgtaaaaatgcttttgaaaaagtttattaattgtaatcataatttgctgtactgttgttaattatgtacagttattgctggaaacattgatttatcaaggattatagacaaaatagtgataagataataacttaacacactattagtattagctaatgtatacaaacaattagatagcttaattgaaaatgtgtgaatatctgcatttttttgacaggattttgatgaaaaatgggcaaaaataaaagagctcaaatagttgactgaactacttgagctcttggattaggaaactgtattaagtttttaactacagcgttagttttaatgattgaattttctgtagttttggatgtaacatttagcaacacccatcatgtgaacactaaccttgctttggtcaccctttaagccactgaaactaataccaaagtatttagtcttagcatcgtagctcttagtacggcaaccaagtaaatcaccagcgtgttcccattcagtgtatctagatgagtcattcatctgactgtcagagcctgcaaaaccgccaaaaagcatttgctttacgttaaagtaaatttggtttttcaatactgacattggacgtaagttagtattgtatgttgaagagataggtaagccagcttcatcttcgtagacttgacctacttttgagttaaggccagaagccttagctgcgcgttcaattccagtaacatagtggtcggcatcccagcaagatctgttatggctgtagtattcgttagctacacgatttgcaaagtgcaaagcacctcgtttgtaagtccagccttgcttgccaagttgatgacgtgcagaattaattaagcttaaagtgtattggctcagttctttttgttgagacgcagttaatttagtcacgttaactaacgtattatctgaacccgcatcactattggtgttttccttcatgcctaaaactcttagtaaatacttttcctgggttaatttttccatcaagaacagcttgtaaaagaacttctttatcaggcttagttactgaagcaataccaccgcgaagaccgacatttttccagaataattggtttgacttaggctctgcatgtggtacacctactctaccgattaccgcacctggacgagcaatttgaccagcttgttcaattgcactttcagcacctacacactctaagaatgcatcagcaccagcattttccttagttaaagccagtacatctttaactgcttgatcatcacgacttgaaacaatgtcagttgcaccaaattcttttcctaattgtgcacgatcatcgtggtgggataaaagaatgattttttcagcgcccaacaacttagcaccaataacaccggcaagaccaacggcaccatcaccgataactgcaacagtatcgcccttcttaacttcagcgtttaatgctgcgtggtaaccagttgccataacatctgacaatgtttgaagggatgccaattgatcatcagtataatctcctggcttaccgggaatcttaactaatccagagtttgctggttcatatttcataaattcggcttgatagccaccgttagtacccggcttcaaattcaagcaattgccttcaaaaccattaatacatgcaacacaatgaccatatccatgagtaagagactgtaaaatagtttgtgtaaggatgaataattccttaaatttatttctttaaacattagaaaaaggagttcctttctcgtatgattggtttgaacaaaaaaacacatacagaaagaaaaactccttcatgaatgattttaccaaagattttgctcaagctctattcaatccagacaaaataaatgatttattgcgcaaagagctacaacaggctgttaataacttgctagaagctgagttaactgcctttctaggctatgatccctatgccagaaatggctggaatactggcaattctagaaatggtgcttatttccgcaaggttgatacccagtttggaccaattgaagtgcaagtgcctcgagaccgcaacggtcagtttcatcagcacacgctgcctgactacaagcagcactctgatgttttggaaagcacgattatcaagctctactccaaaggcgtaactaccagagaaatcgctgacttgattgagaaaatgtatggcagtcattatagtccagctcaagtatcaaatatttccaagcagatgctccccaaggttgaggcttatcacaagcgcaagctaagcgacaagtttttctgtgtctatttggatgcgacataccttcctttgcgccgagaaacgtttgagcgtgaagcagtatatattgccattggcattaaacctaatggacataaggaagtcattgactactgcattgctcctagtgagaacattgaagtctggacagagatgcttcaaaacatgaagtccagaggcttgaagcaagttgaactctttctttctgatggtgttgttggcatgaaaacagccttggccaggacttatcctaaagctcattttcaacgctgcctggttcatgtcatgcgcaatatctgtgctaaagtccgggtggatgaccgcgaaaagatcatgaacgaattcaagcagatacatcaacagacaagcaaaaaagaagctgcagctgtcttgcacaaattctatgccagatggaataaagcttatagcaatgtcatcaaaggtttgaaggaaattgagcccgatctgctggtcttctacaattatcccaaacaaatcagagcttcaatttattcaaccaatatgattgaatcctttaacaacgtcatcaagcgtaaagctaagcctaaggcagaatttccaactgaacagtcgcttgatgcatttattggcatccaggcaatgagctacaatgaccgctatttcaaccgaattcataaaggctttggtcaggttcaggataccttagaatcctattttgattaaataaatgattaaaaaatcaatttacgagaaagaactatttacacaaaagatttgacagtttcatgagtaaatggtacgagaacaaaatcatttggtttaatattagttacctcatcactaacttcttcaacgacaccaattgcctcatggccaattaaagacccactttcacgatcagcaattcctctaaaccaccataagtctgaaccacaaacacttgcacgtataacacgaataattgcttgattttcaccatcgatttttggctttggaacttctcttacttcaactttacctggttctacaaaaactgctgctttcatattatttctccttactatcgtttactttatatacatagtctaatcaaaacagactgtctataaaattactaatattaaatgctactattcaaaaaacgtatagtaatttcatttatgaaaaagaaccgcttgcttaaaacaaacggttctaactattagttacttattaatcttcatcagtattttggtgctcttgactgtcatttttttctttttcataatccttgtcatgatctttttcatcatcttcagtctcagtctttataatcttctgatttttagcatcaatttcaacttcggttttcttacctccatcttcaaattctactttccagattggctgatcatcatcaatttctaatgaccattcaacaggttgacctgatacctgagtttgagccaattgagtagcttgctctcgagtcatcatattattaagatctaatgcttgcgcctcatcatctgaatctaatttttcagattcagcttttaaaatattgccattacttgcatcaatcttaactttgtattcattttgtgaatcaaaaccttcaatttcatacacatatgaattcttcttttgctctagttcaatctccttaattgattttgagccatacttttcataaaacttattaactgcatcttcttgagaaagattaatacttgcagtacctgtattactttgattttgttctgtgttattgctttgactctgttgcgtttgagtgccagtagaagcattagcctggttaatcgccaataaacttgcgccacccgctgctaagcctaatgcagctgctgccaatgatacttttttaatgttaaactttttcataattgaattcctcgcttttcgtattaattaactttgtacacttagtttacgaaaaaaggaacctttaaaaaccaagatttaatgtagatcaaatgaaattttcttcattttagagttttttctaattaaattgatttttcaataaatatcctatacgcgtggtgctagttaaatcgttctagacaatatgccatattataagctaaaatagctatttctagccgctgttgaaagcctactggacttcttgctcgattattctcagcgttgtaataactaagcaaagaaaagtcgctttcaatgcttcttctaattgccatcaattgatgatcattatgccttctagctccttgcatatttttacgatatggcgtccaaagcacatatcccatgtgctttagattagtagctagatttttgcttaaataaccttcatctcctaaaagataatggttggctggatgagcattgatcatcaattctactgtctctttggcatcatgtactgacgctttagtaactgcatagtcaagcagatagccatcatcgcttactattgcgtggaccttgaagccataataatagactttcttggttgctttataaccaatatcagctacgccccgaaagatcttgacacgataattgcgaacaggctggcaaactggcactgggaaactatcaataatcaaaaattctccagctgtctttacttcttgattccaagcctgacggatacaacgaattagaggcaagagcattcgagctcgacggttaaaacgagaatgagataagccaacgaagaatttacagaatcttcgttgagattcaattccaatttcagtttgccaaatgagcatcgctaagatagaactatcaggaagcttggtctgatcaacatttttacgatgtttaagtccatcaggcgcataaagcttatacagcgagcgacaaatcacatttaaccgattaaaactaacttgtaaatggtgagaaaaacgcttaagcttgagatagttcaattagatcagactcttttctatttaaattacttacaacttgagtctagtctaattggacttttttattaactaaaacgatttaactagcaccacgcgtatcctataaatttgtctcttttttgacttgttctagagcctttacctgtgcttgatctaagggacgatactcattcatcttattaagtaattcagttaatttgttggtattcattttatcactctcgtgttcattagttgcttttgttaattcattttattatagaaccctcaataatcactaaaaggaatttcaaaaagatttagcgtattttatcacctttggaatttttctaattaaaaaagttattgacaaatttagaaagcggttttattctaagaatgaattaaataatgttcttcgaggcagggtgaaattcccgaccggcggtaaagtccgcaacccgcataagcggttgaatcctttaatggtaccgatagttagagtctagatggaagaagaataattttgctgtgctcttttctattttgatagtaggaactgtacttaaattattttttgaatgttagttagaacctcgaggtaattcttcgaggttctttttttgttctgttaggaagtgaaagaaatggaaaacagtgatgaagcatatatgcaattagctatccaagaagcgaaaaaaggactctatcaaacatggaagaaccccatggttggagctgtcatcgttaaagatggcaatatcttggctacaggtcatcatattcgttatggttattatcatgctgagcgtgatgctatttcaaaactaactccagaacaattatttaattcaaccctatacgttactctagaaccatgcagtcattatggtaagcagccaccctgctctgatttaattgtctctagcaaaattaaacgagtggtaattgcgcaagtagatccacatcaactagtaacgggtaaaggtattgccaagttaaggcaacacaatattcaagtaacggttggcgtattagaagatcaagcaaagaagctaaacaagttttatacttacttctaccaacataatcatccatggataacgttgaaacaggcggtcagcttagattatcgaattaatgaggctaaaaatattcgcactcaaataacaaatgaaactgtttatcagcgagtacatagagagcgcgcaaattatcaagccatcatgattggatcaaatactgccattatcgataatcctagtttactgactactgtcactacggattttccacccattcgaataatagtagatcgacgtggtagattactgaatcatttaaatattaagttattaacggataagttaagtccaacttggatttttactcaaaatacaagcttagctaagactccacataatgaaaatatctcaatttttttgatgaaaaacgcttcaatcaccgaagtcataaaaaaactgaccaatgaagagatccagtcggtttatgttgaaggtggtcctaccctagctaatgccttgctagccgaaggtcaagtaaacaatttaattacttacataagtccaattttacttggtcaaaaaggaaagctaggaatttcacccagctccaaaacaactttacataatttacgtgctgaaaagttggatgataattttagaattgaaggtgaaattaatgtttagtggtctagtacgcggcgacgcacgaattgctgctattgataaaaacgatgaaactattgttatgactgttgcttgccagcccgactttactaaaaacttgcaaattggcgattcaattgcagttaatggaacctgtttaactgttgagcaatacactgatacttcttttgtagtaacgatgatgccacaaacttatcagaaaactacttttaagaatttggatatcaatgcccaattaaatgttgaacgttcactacaggtcggacaaagattagaaggtcatctagttactggacatattgatgatattgccaaagttacggaaatcaggactaacgaaaatgctattgaagtttggtttgcctttcctactcgcttaaaaaatcagattgtagcacaaggtagtattgcaattaatggcgtatcgctaacagtaatggatacacatgataatgttttctcagttggattaattcctcatacacaagatgaaacaaatttaagtaagttaaatgtcggctcagaagtaaatattgagactgatatcttaagtaaatatgtcgctaaaaatttagaaaagagaatttaaaatggacgtaaaaaaaattcaaaatgcaattcaatggatgaaaaatggtggtttagtgattgttgctgatgatgaagatcgtgaatctgaaggtgatatgatcggcttagggtctaaagttactcctgaaaatgttaactttatgaccaaacatgctcgtggcttactttgcacccctgtaagcaaaacaattgcccaacgtttaaatttctaccaaatggaacaaaataatactgatccatatggtacagcttttacaatcagtgttgattacaaaaccaccactactggtatttctgcttatgatcgtgcggcaactatcaaggcaattgctgatcctacttccaagccagaagacttctttagaccaggtcactgttttccattagtcgctaaagatgatcaaatcaagaatcgtaatggtcacacagaagcctctattgccttagctcatcttgctggcgaaccagaagttgcatatatttgtgaagttatgaaagctgatggccatatggctcgtcgtccccaactgaaagaaattgctaaagaatatcacttaccatttttaacaattgcagaactacaagaatatattaatagtcctgtgagtaaacgctcagaatttgtaaaccttcctactaaatatggcaatttcaaaattaaggctttcgccaatgaaaacttagctattattaaaggaaagattgatcctaaaaagccagttttagtacgtcttcattcagaatgcctcactggtgatacgtttggctcaatgcgctgcgattgcggtgatcaattacatactgccatgaagcaaattaataaaaatggtagtggcataattctttatttacgacaagaaggacgcggaattggattaattaacaaattaaaagcttatggtttacaggaccaaggttatgacacttatgaagcaaatgaaattttaggttttaagccagatgaacgaaattatattattgctgccaagattttaaaagatctaggtattagtcatatcaatttgcttactaataatcctgataaaattgatcaattagaaaataacggtattactattgaaaaaagaattcccctggagattcctgctaatgaggtaaatcatgactatttagaaaccaaacgagataaattccatcatttattaggagcattatagtaaggaacacagaaatgaatatttacgaaggaaattttaaaaacaataattatcatatcgcaattgtcgcatctaagtttaacgaaattgttacccatcatttagttgatggtgctattgctagcttaaaacaatttggagtacttgaagatcagatcgatatctattgggtcccaggtgcttttgaaattggttttactgctaataagcttctcaattcaaataactacgatggtattatgactttaggcgctgtcattaaaggtgagactgatcattacagcatgattattcagaatgttacaaacgcaattatgcagatgaatcttaaagcagaagtcccaataacttttggtattttaaccactgagaatattgatcaagccttgcaacgatccggcttaaaagctggcaatgaaggttcctctactgctcagagtctattagaaatgatttcgctaaataaacaaataaagtaaatcaaaaagtgtctgggaaaaaactagcttccagatgaataaaaacgatcaagatttccttttttaagaatcttgatcgtttttttgttctctttaaaatttttaacaataaaaatcggcccttcagccaccttctttgacaatatttgttcaaattcatcatcataaaggcaattccgatatcggtttcgaccttctctttacctcgcaggtgcgttctgcgcatgccaaatacgttcttcaaatgtccgaaaactggctctacatcatattttctcatgccatagatgtgtctgccttcttcgctttggagaacttcttttgctttttcttttaaatattgccagttaggattatagcgaacttggcgctggcggccgctagctgttttagccaattgttccaattctggcgttagctggaactcgtctgcctcataaaccttaaaatcacggacctgaccagtagaacgatccttgcgctggctgtaatatttgaaattgaatctgacgccatgatgatcaatgtaataatcatctttttcattgtagtaccagttgattagcttagttggatcattcttatactttttggtctgttctttttcatacatagtgtagggaataaagtacttcttgtctggatatttttcctccagcatcgaataattgtattcactgccatagccagcatcggcgacgattttgtcaaacttgtccaacacggtcatttgatccaaaaccggctccaaagttttgaaatctgtcggattaggaaagatggcataatcaactacatattgatcggtcgtgactgcttgaatattgtagccaggctttaattgaccatttttcatgtggtcttccttcatatgcataaaggtggcgtcatgatctgttttggaataactgttgcgtccggcaaagatctcttcggcttcttcatatttttgcattcttggcacataatcttttcttagccggtgcagaatcttttttagtccacgtcgcttggcttttcgaggtgaaccgccaggaatggctttgttttcctgctcaatctctttagtcagcttgttaatttctgcttcagtttcttgagctaattcctttagcccctgactagtttgaactttttctttttccatttctttgactacttctttagtaatcaattcatcataaagttcaactgcctggcctttcagcttttcatgatacttttcaaccgctttgcgccagacaaatgtatagcggttagcatcagcttcaatcttagtaccatcgataaaagcagcaccttcattgattaagccttcatcttctaacaggttagtgaagtagataaagctctttttaatcagttcattggcatggctgcttgatctaaaattattgatagtatgatatgaaatcttttgctggtcagccaagatcatcattggcagattttcttccagcatcaactcaatctttctgccagaaaaaactcttctggagtaagcaaaaagcagtattttgagcatcatggctggatgataggctgggcggcccgttttagcagtcttgcctactaaaacatcttctggaattgaatctacaaaccagctgatgacattagccaaatgattggccggaatggcaaaatctagattaagtgttaaagcagtttgacctgtgatataattcttgtacatgttagtttccacctttttgtttttattttgtgatgatttaataatatcaaggctggagctaaaagtatacaaaaagagcgttgaaacaaaaattcaacgttcttttttcatgatctgagacttagttttttcccagacactttttggtaatattgaatatgctccttaatagtccaagaatatttaactagtactacgcttttgaattacctagttctgatcatcgttataaccaaaaatagttaggaactgtaagaacaggttgacaaaatctagatataactacaaggcacccagaactgctaagccattggttgaaacttctccaccaaattgtaagtaaatattcttcattctttgtgcatcccaagcggttaaaactgtaaaaataatcactgcaataaacgagaaaatgtaactaaccattgggttctttaagaacaaattaactaacatcgccacaatcatgaccaattaatgcagctgaagcatacgaaccccatctactcaagtcctttttagttaccgtcccgataattgccattgccacgaatacgctagccgaagcaacgaaggccgaagcaatatcttgccctgtataagcgcctgcaataaaggcaaaagtaattccataaataattgccgtaattatcaataaaataaagctggctactggagttcgagttgctctaaagttaatgacaaaggttaatgcgattggtaacaataatagcagccacatcgtccacggatgactaaccattaaggcaaccatctgcctagcaaaaacagtcatcgtaagataggcactcaaggcagaaacaaagacagccagtgccatatagccataaattttacttaaaaagacatttaaaccagatgcatcaactacatgacgacgacctggattttgatcgaactcatccatcagtatttcctccaatctgttagatttctttggttgcttttaatgtatcacttaccgagattaaagagaaatatgacggttcgagatttcttaattcagttttgcgaccaataaattgattcatgatttaaacccttcggtaatcttaattgctatacttaacaaaaaagagctaaagcaaaaatagagtagagggagttttataactcgcccctctcattgcaccggacgtacggttccgtatccggcgctacgtttgtgattatttacgagataaataatattctagcggatcgaccaagcctgggcgatccgctttgcttatgcccaatacttttgggctaagcagaaagttaatgacatgacccgtacttcttttataccaacctaagcgcgtattagctactttatgaatatcttcatcactaaaattgcactttagtgccttgttaatccgcattaagttaatgtatattcgttttggtagtttccattgtttaatgattaccacccgtactttatgacgcagccattgactgaacttaattagaaaatatttcatgtcgccaactctaaagtaattgacccagcctctaactacttgatttatcttagtaaagactagtgatagaggctgagcagctgcttttctgcgacagagaagttctctcatcttgtcataaagcttgattttgcggtcatctcctggctttgcttgccagtattcgccacttttccagaaggtaaagccaagaaagttgctcttggttggtcgtacaactttggttttggttgcgttgacctttaggaatagctttctttctagccatgatgaaattgaattcatcacacgtttggctgatttaccgcttttgacaaagatattgcagtcatcggcatagcggacaaagcgcaggcctctttgttccaattctttatccattttatctaaatagatattggatagaattggtgaaagagggtcgccttgtggtacacctagtttattaggcttaacccaaccatcttccattactccagctttaagaaaggctcgaattaaatggagggtggttttgtcatttacttgctctctaattattgaaattaatttatcatgatttaccgtgtcaaagtatttctcaatatccaggtcaacaacccattgatagccttcgtttaaatattccaagacttgttcaatagcgtcatgagcactgcgtccaggtctaaagccatagctatgctcactaaaatgaggatcatagatcttcattaatacttgggcaatagcctgctggattactcggtcaacaaccgtgggtattcctaaaggacgtttcttaccattagctttaggaatgtagactctgcgaacagcttgcggacgatacttcatcttcatgatggcgtcctttatttctacttgatgctttttaaaatagctatcaagctcatcaactgttctcctgtctacaccaggcgctcccttattgattttgactctcctgattgcttccttgagattattttgacttaaaatctgttcaattagttccatctcgtgatatctccatttctacttgtaaatttattcagaattgtcccaattgctttcaccatcaaagagttacgttctctttgtgctaggctatcctcttatccggactgtctgaacattgcttatagcgagatatgctcttacaaacattaggcccttcgctccagtttcattacaaaaccttcagcactactacgacctcagctgacttctcgcgattaacctttttcgaccaggcttacgatcgctgatattaaagcttactcggtttcacctgtccacgagatctctcggggtaagacattcatctttaattttccactgccccctggtttaccgtcttggttttacggttgtcctttggactttaacttgtgctgcagtctcatccaccatttggcctgaccaggtttctgtacgtaggctcggaaaactcgctagccacttccttcacccatagcgtcaccgctaacggcttgtagttcgctacacttggcgacaactacccgtgatctagactttcactagactagacaaatgccatgcccgacacacaacaaaaatagagtcttcactgaagactctattgctttttgaatattaaattaatcagtttctctttctaaaagctgcaagactgaatattcctgcgattgcggcaaacacagccccaatagccgtcaacccagtttgtttttcaccagtttgtggcaaaacattcctttgtgtaactgctttttgaagtttaacttctttaacagataccgcacttaccttagaattggctaacttaactggtatttctttcttagtaaattgacatgatgacactttttcactctttggagcaacagtcttattctttgctactttatttattttactcgttttctttgtcttatttacccgctcagcttttggtggaatatttttttcttgcttgtctatcgtttcaggatgtggagccacattattttctgatggtgcagttggctgagttggagttgtcggttgagtcggagtttctggtacatcaggtgtatcaggctgtggtgcttttactggaaggatgtctacaacatagctattttcaatcttcatatctgattctttagaaccatttaatctataggaaactgtcacaatatatttaccggctggagtttgaccattaattttattaatcttatttctgaaaattgaaagcaccaaaatcaagctcaagtcctgtcactattgagctttcttagacgtaattagtttttatatgatctgtttcagtgcaatttgtatgaatcgtggcagttggttaataaagtcattgattacttcatctatcttttcaaaactattctgtttaagctcttttaattctgaaattaagtagaccaatgcatctacgaatctaatatcaggtaaggattcgttcattagatagaataaatctccgattgtcttatcatctgtattttgtctttcctgccaggtcaatagatcataagttattgctgtaactgcgatatagccacattggccatcatagctttgaacttgagatttatctaaagcaagatattgcttagacgtcttaaaatatgtttcaatttgccatctacgaccataaagttggatgatttcttcagggctaagctttgtctgagtagtagctaaaaccaaatacttgttcttgtttccacggttggagacaaagacgagctttaataaaaagctatgtccatgatattgagcctcaactatgcttgaataaagataatgtttctttttacggatgtttgaagcagccaaacgatcatacaagtctttaacgctatagcggcgatggcgataaatgtaataaatctttgaactcttcttgatcatgccaagtccatctaaaccgatcttctttaaaatccaaaacattcttggagaagaaaaccaagaatcgaataagacgtatttagcttctactcctaatcgtaaggcttgtctaatcaactctacagttacatcattcatctttctctgagcttgatttctccttttaccagaaattgaacgttcatcagcagtaatgggagcagctccaatcatatttttcttggttttggttgacatcaaggcaaagttaaccggcaagaaggtattgccatcgctccagcctaaagttaaaccacgatatccgttcaaatactcatgcttgtcatggtcatagactttagctagcaattcggtctttttagaaaaagaccgagccatcagcgtatcgtcaacgataaaagcaagtcggcgtcttttatcgataaatggttttaagcagccaatgagccgggctgcaatcaagcataatagtttttgccagttgattcttccatcgttaagtacattgcgagcagttctaacggaaaaacgtttgtcatccttagctctgaataaagaaagccgagcaaaatgtactgacatcagccaagagataatcatggttaatgaaacggtggatttacgcttaaaattgacttgtttagttaacttagctagaccaattagattaataaatgaagaaattaaggatttagtatcattttctgtgtcgatttgttctatactgttcattgcgcaggatctcctttactttttaggtcgacacttaaagtataacgcagagagatcctgcgtttttatttttgataagaaaaagccaagaggcgcggggaaggagcgttaatcttagctttcaagtttcagtcttatttcctttttcatcgatgatgccaaccaattgaacatcttgtgcattaactggaatattttctaataagtatccattatagacagcattaggatttcttacattaaatactccagttacaccttgatgataattccagtcttgcgcttctttagatccttggtttaaagtctcatctttagtagcgataatttaatgtacttcaacatagaaaattctcttattctgatcttctttattaagtccatgaataattaccttatgactggtatttgtatcataactataaaatggcattaaagtggttaaatctcttgcctgcggattcactgaatagccatatttatcaattacctgttgaatctttgataattgaatcttatagctaccaccctcataaaaagcttttccacttgtgtccaatatattaccagaattagtaatctgaataacttcaccaacttttggtaaactctcaataagttgtggtatattgacagcatcataactaccatcttgattcctagttaccaaactaattggagtattctgagcttcatcaactgtccaaagcttttttggttgtttatatgtgcgtacataaatactctggtcgttttgagcttttagatctatttcattgaattgatttcctgttggatcaatgatcaagggtacattcatttgcgcagtagtttcaccaggaataactcctctgaacccaatctgtcttacgttactaattgcggcagcgccaaagtttttcatcatttcttcataagaataccaagtaccattttgggccaagtaataaactgacaaagcattatcattaatcaccttaccatttttaataaagactacatttgctgccttagtactactgatttgcaaacttagtttttccttattggaataccatgcattgatcattaaaactgcttcatcattaggattagggttagagtcatttttactattaccaatcatttgatcagttttagaaacattttctagagttaagtgagcctcagggtcttgagcattttgctcaattaaaatggcattattattcttacctgcttctgcacttgaaactacttgagtctgattcgtgttcttgttcttagcggtaatagaataatcatacttaattgagccgtcagccggcacgttagttatattagcatttttaccttgtccatttgtttttagtccactagttgtattattttcaccgagaataattgcttgatcagttttatcctcagagtctaatttctgatacgcagctgatatttctgtcttaattttattttgatattgatcaccatttctttcaaccttttcaacagatgaactattttgagtagattgctgtttagattcaacagttagaacttgttctgacttttctggctgattagcagtagtctcagcagcatgtacttgacttccactaaaacccaaaaaagtcaatccaattaaaactgaagcagttccaatagttaattttctaatcgaatacgtttgtttttgatcaaatttatttttatctaacatttgaatcacccttatgtgaaaaataccgtttctcttttcgccattataataacacccgttgtaagtgccttcaaacattatgcataatttttaccaaacaaaaagcatgaccgaagccatgctttttatcttttatgtatctacttatttttgaactttttctatgatcatccgaataatatttaatataaacatccaagcaatgttataaatccaaatctcacagatcatccatagtgaaatccttggtacaaaccagcccaagtagcatgcacatgcagcaaaaatttgtgtaattacaattgcccagaaaagtattggagctggaaatggtctttcgaagaaccaacgagtttgacgagtaacaaacaatagtaagtgcccaccagcaactaattgcaagaacataattgtctgcaattgtgaaaggtttccaacttggaaaatgctaattgagccaggatttttaactgacatatatcctataaatagaagcaacattgattggattacagcaaatacacccaaaattgatgaagttgtaagaatcttcttcatctgccatctgattggcttcttagaaacataggtattgtcataagcaatagtcatgattggtaaatcatcaagtaatgacataaccacgatcataattgctgttaatggctggaagttcaataaaattgatgacaaaactaccaagaacataatgttcattgtcaaagcaacacgataaattgtgtaacttgtaattctggcaaaaatctttcttgcctctgtgattgcagtttgaataactgacaaaccgggtgaagttaaaattaaggcagcagcacttctagcagcatcagtagctccagcaaccgctgtaccacaatcagcttgcttcaaagcaggtgcatcgttgaccccatcaccagtcatcgctacaatatgaccttgcttttgcaaagttttaacaatcgcatatttatgttctgggaaaactctggcaaaaccatcagcttgcgcaatcaacttttccaaatcggctggaacatgatcaggatcaagattcttaggaaaaactttagtagcgttataaatattagtacccatgcctaactttttagcagtttcaatcgcaatcgcggtgtcatcaccagtaatcatcttgacactgataccttcacgcttacaatcatcaattgttttcttagaatcgtcccgaggtggatcgaacatcgacaatacaccaagaattgtccaagtcttgccttgatccttactttcagctacacctaaggcacgataccctctttttgctaaagcatcagtggtatctagaactttcttttggacatctggatcactacttaatttagctacaacctggggagcacccttaatagcccataattcttctttagtattattattaattaaatgagcttcaattcgcttagatactggatcaaatggaataaacttttccattgtccaatcagctaaaacactctgatctttcaaagctttaataactgcgttgtcaattggatcattatcttctttccttgaagctaaggcgccaattttaattacatcttgagcatctttagcgttaattaaagttgtatcacccaaggttaattgatttttggttaaagtaccagtcttatcactacataagatgtctaccccagccatttcttcaattgaagctagtctagaaacaatcgcctttttcttagataggttcaacgcacctaaagccaacgtaattgaaaagacagttggcattgcgacaggaatagaagcaaccataattaccgctaaaactacggcaacgataattaagaaattaccaatcttaaacattgcttcttgagcaggacttttaccaccagctgaagcaactaatttagcagttttaccaaagaaagtattagagccagttgcaataacaacaccggtcatctcaccttttttaacaatactgccagagtaggcctcatcaccaacttttttagttactggcaaactttcaccagttaaggcagcttgatcaattgaagcgtagtcccaagcgcaaatctgctggtacgatttgccctagccgaattttaacaatatcgcctggaactaatttgcttgcatcaatcgtttcaaatttaccatcacgtaaaactgtagcagttggagctaagcccttcttccacgctgctaacgcatttgacgctttacgagattgccaaaattcaatacaggcattgaacaacagcaatacaataataatgaaaaagtcatcccagtggccaataattgcagaaataattgcagctgcttcaatcatataagcaattggaccagtaaagtcttcaaaaactttagccccattggttcctgcttagcagtaatggcattcggtccgtacttttgcaagcgagcctgagcctcttgagaagtcaaccctttttgtggatcaacttttaacttttttaccacatcttgaatatcatctttttcaagatctgtcttctcttgtttactcattattctgacctctctactttattaaacactcagatctagttttagtataaaactatttcagaataatgtttaagagaaagccttacaaatttgtcattatacgataaaaaaacaattattaaaatatggttattttattttcaagtagctaatgaccttatgaaggcaatctagattccttatttctctgcaaaaattgtttttcagcgagaaattttgcaaaaaacacagccaaaatgtatcactaggtttggttatatattttttctataaaaagatttattttttagcccggatttaaaattgaagtgcaacactaagtgttaaacaaaaaggccatgaagacctaaacttgaagtgacgaaaaatcaagaaaggaagatctttatgaccaattcaaattctagcatttctaagcactatcatcaattaaccagcgtacaacgtggacaaattcaagcaatgctggattccggcataacttcccgtactgttatcgctcaagaagttggctgccataagtcgacaatcagtcgcgaaatcaaacgcggaagcgtcctgcaaagagacagcagctatttattgtatgagcactattacgctgatactgcacagatttattatgagaagcgtcgcaaaaactgctatcagcgcaatccattgaagcattatgctgtctttttgagaatgctctccagacgctttaaagctaaatttgatgccaccagcatcgatgagttcgttggtgaattcaaaaggactatgccaggctacccttgtcccagcacaccaactgtctatcgctatattgatcagggcttgctggacataagcaatattgatctgcctatgaagctcaaaagacgcaggaacaagcgtcatcacagccatggcggtcacgctttgcacaagaagcatcttggcaattccattgaacagcgtcctaaagagattgaagacagaaaagctccgctgcactgggaaggagatctggttaaaggcgtcagacgcaagaatcagcctgctttaatgactttgactgaaagaaccacacgctttgaagtagttatcaagattcctgactatcgggcaagcacatgccaaaggctgcttcaaaaggagattgacagacatcctgcctggtttaaatcaatcacgtttgacaatggctctgagtttgcggatatgaccaagatcaagggctgccagatttactttgctcacccatattctccatgggaaaggggcaccaatgaaaactgcaatggtcttttgcgtcaattcttccctaagggcaagagcatgaaagacaagtcaaaagcttatgttcaacaggcaactgatgccattaaccacaaatatcgccgaatcctccaatatcacacagcagaagaactcttcaagcaatatatttcctcatagcctaactgttgcacttaatttgacaattcagggatttattttttagttattgaatatttaaataatgtttcgatagtctatttacatgctaaacggtcattatgatgctttgatttaaccaattcttatgctaatcatgatcaaaaaattattcatcatcaatgatcaagaccagatcgtgcaaaaaattaattctaaggtcagaaaaggcattcatcatctcaacgttatccttctactaattctctaactatattgtagttacttgcatcatctgaatcagaaatatctgcactagcttttctctcatttttatttactctttattttttgcgcttccaatcttatcttttaaatccaaagctttttcataaataaagaaaccaattacacatgtcaatatatcactaattgcttgagaccaaacaataccgtgatagcccagcgtcatcttcatcaattctagaaccacaaaataaatcacaccttgtctagcgattgccataataaaggcaccccaagcattaccaacagattggaaaacagttgtataaaccaatgcgattcctactacaggcgtagtaacaatcgtagctaacaacatgtaactaccggcactaacaatatccggctgattcatgaataatgctgtgacaggacgggcaaaaacaattaataatccaccaacaattaccgcatatacaacttgaactaaaatatcaaagcgaagaatatctctaagccgccgccaattctgagcaccatagttgtagcctaataaaggttgtgcaccaaaggcaaaaccaacaatcaccaaaatcacaattccatatattttttgtgtaatccccattgcagcgaccttatcagcaccataaattgccagtgacgaattcaataaagccatgccaaagctttgagcaaaattagtaattgatccaggaataccgattgctactacttccttgattgattccgcattaattttaattaacttgggatctagagtaatgaatcttgctttttgcagaatcataattactaaaatcaagtcagttacaacataacctaaaatattggcaattcctactcctgtagcaccccattttaaaacaaataaaaaaattggatctaaaatgatagctaaaatagttcctgtcattgtggcaatcatcgcctcaatcgctaatccctctgttcgaattaagttctgtggaataaagctcagaataataaagactgctccaatggaaagcacacgataaaaatcagctgcatcgttataagttgccgccttggctcctaatatagttaaaataggatgttcaaagattagcaagattactgttaaaaacagaccagtaatcattccaccatacaagcaaaaactgctgattcttttgctgagctcgtattttttctcaccaaataagcgggaaataactgacgaaccacctaagccaaaaatgtcggcaacagctattaaaaaagtaaaaagtggcgcaccgatcgtaattcctgcaactagattagtatcgcctgttttggcaacaaacattgtatctgccagattataaatcatggtagtgatcatacccaagactacaggtagtgctaatttaaaataaacttgcttaattggtgcctttgcaaataaatcttccatttgtttccctcacaagaaaaagcaacctagaagattcttcgggagtcatcctcacgattctaagtcgcttatgttacttgatattcatgtattatatgttaatctaaacaaattctttgattagatgcaatggcgtttttaattcggtaagtgtcattgttttttgtttatagcatcagagaaatctccatctatgctaaactattaccaaaatattgaaggaaaactattatgcaaattaaagaaattatcaaacttaatcaatcaactgagcaagaacttttaaccatctgggaaagcagcgtccgcgccacatataaatttttaaacaatgatgaaatcttacaaatacgcaattatgtaccacaagcgtttaaacaagtggagcatttattaatcattatcgatcatgaacaaattaaaggcttcatgggaattaatggtcaaaaagttgagatactcttcattaatgccaaagcacgcggcaaaggatacggcaggaaattgttgaattatggtatgcaaaagttaaacattgatgaattagctgtcaatgaacaaaatccaaaagcagttggattctatgaacacatgggatttaaagtagtggaacgttcagcaactgatggtcaaagcaatccttatccaattttgaggatgaagttggataaagaaaagtagtaaacagttatatttagttattcctttttcccttgacaaaaatatttttaattttcgagtaatatcatttgtctaacaacccattcttctatattatagaagacgctgctgatacggatgtataacggactgataatcctttccgtaaattgcctgtaagtcagataaggcgaacagcaaggatacctgctgttttctgaatcttggagatattcttatcagagataggtccaaaagactttctgccaggcgatggtagtcaatgtatttcagcgtaaggctttttctgagctggcaagcacaataagttgatgtgaaaatcagcttgcatcagggtttttgacctaatattaaggcggaaaacttaattggaacctcaatgtaatgaccaacaagcttgtttgctgtgacgtatgcgatcaaaagcatgctataacaggtcagaaaagaacgagtagcttaatcggcaagattaaatgatactattaggtacaatatatagaacgcacatcaagtgaaagtttacggtaagcaatccgtttaggacttcggtaggttctttgaacccaacgcaagaaagaagcataaatagctaatctgtgggcggtcttgttatcctatggctgaataaagaaaagaaaagtatgaaaagcatattttcctaacgttggatgcaaaaatgattagttgctaataacaaccagtagcattaattaaaaggagaccggtttgtctatgaagacagctggtctctttttaatattctaattattttactgtattatcacctgacactgtgtgcatccctaagtgactgccatttgtctccttacctacctatgcatgagttgccttaccaccaaagattgaattatcaccgactacagtcttcaaatcacattgatccacttcaatattttcagccaaattatcacctgaagtcgttgccacatcaagatcatcaagaatttggctatctttaatggtaaagtcaccgctaactagcttaatcttaccacgatttagcaataccttctttaatttaatatcacctgaagtttcagttattgcaacttcatctacttttactttcttcaaatgaagatcaccactaagagcagtaaatgttactgtctctaactcaacttgttttacaacagtgtcaccactagtcaacttcaaagtagcgttaactaatttatgttctaccggcactgtaacttttaatgcaacaatatcatcttgactcacaatactgatttcaacatgctttcttttccagaatttaccattcttgcgttcaaccttaggttcttttaattcaagagttttacccgcattagtcacaatcggcctcttatcttctggaccgtggtaatgtacctcgaactgatcgccgccaaccaatgtaaaatcaatatctactaaatccacgctcaatttgtcaaagctatcattgcttaaaactttatcaacaattttcacttcattgtcttcatttttgtcaaaaaacattttctttctcctcatttttaccttttagctattattcttatttttctttaagtttactatcatattgctatttttcaaccgtaatttactaagtggtcaaaatttgcggctgaaatgcaaaaatagacaacttaagttttaacttaagtcgtctatccttcatcctaaaattttctttttcaattcgtctaaacgatcaattttaaacgtgaacgcctgtatccctaattcacttgcagctttggtattattttccaaatcatcaacaaataaacattcttctggctttaaatcatatcgttttaacaaacattgataaatctgcttatcaggcttcatcattttttcctgtgcagaaaagacaaaaccatcaaaataatcacccatcgaagaatttttaacaaagttagcaaattccatccctgtattagacaaggcgtagatatgatagccttgctttcttagttgatccataaaacgaaaaacaggttcatagaaatctacattttcaggccaagttgtcataatttgcttaaccttcttctgcagctcaacaggtacgcgactaataaaaatcttagtcgcctctttttcatcgatttttcctgcatcaatttcagaccattcttttgattcaaaaatcgtttttctcaataaatcatgttcttctgatgttaattgataatgatataaaatttcatcaggattgtaattcataatgacgttgccaaaatcaaaaataatattttttaacataaaatgtcccttctaatacttttaattcacatcttaattttatgctttcttgtatcactgcgaaagaaaaataaaaattgactttttctttttatcaaataaacacaggataagtgaagtcattaaatcttttagccaagagcattgtaatagacacataatacagtataatgattattatcaattacataaaaaggatgatgattttgaataaaaaagcattcagcctagacggcaatcaattaaaaactttagcagttgtgtttatgatctttgatcatatctacagctatcttctattggatattctaccaaattggtgcagtttaattgctcgcttcgttgctccacttttcgttttcatgttaattgttccccatgaccctggcattgcatatactgcataaaagtcattgccagtaaacttttcaagatgcgttttgtctttgccaaattcatccttacctgtctcagtagcattttgatattttacaaaagtatcttttagactatttgcatcaatcttcaatttattagctagttcaacaattgaattggcatgtacatatacttggggattttcttctactttatctagtttttccttaaatgatgaatccatttttttgccatcataaatcaaataatacttttcacttccatgcttgtacatttccgttcttaaattcaagaaattatatggtgcctcattagaaaaacgtttgccattctcatcaattaacattgtttttgaataatcaggtacagtattccaagtgataaataattgtggggcaaaatcaatcgttccattcttataaacatcattatttgaaaactctgcattaacagctttcagtaaactataaccatcaccagtattggcaggactagcttcgttaaagacatgaaccttagcaacagatggtgtgaccttattaagaagatcatccttttcataagaagcaccgcctgtggcaattactacagctttagcactaatagtaaattcacctgctgaatttctcacttgcaaccctgatactttggttccatcatctattatttttgtaacccgactgttcaaataaaacccgccgccatgttctttaatgtaattagccagcatttctactaaatgtgcgccattagtgaaattagcaataataattggactatcagaaaaaatacttacttgcgaatttgttaaggctactaaatcatcgaatgtttttccagactcttctaacaattgttttaagaattttcgatcgtgctccttagttgcatttttattaacatgatcgacaaagttcaataaccttatcattgtcggtagctataattacagtcgcattattaatttgctgctttaatccttcttcactcgggtaaacaccccaatgctagtcgggactataatcatccgttttttgatcaagacaaacttgtttgtaaaaagcacaaacttggcttaaatcttgaacagtagcagttcttatttgcaaaaaaatcccccttctattctatagttttcgattataacaaaaatgcatccccttcccaagtaggatgtggacgcattcatttaatctatattttattcatcaatcttaggggccttgccgatttgagcttgcatcatccagattctcttttcaatatctgtatggcatgacgttaagatatcatttgagccatagtcgccttcctcgtcacttaccttgatcccttcttcataaaggtgctccaaataacgataatcagcaatgatagtcgcaaatctttctctagttgaaattccccattcaccaggatgagcttcgatcttagtatgatcaagcacttcctgtaagcttgaatatggtgacccatcaattgtaatcaatctttcagagatcaagtcacgttgttcatcaagttcatccattacctcgtctaaatatgggtgcaattttaaaaattcaggtccacgcatataccaatgttgttggcggacaaccatcattaattgagtagtatcagcaacagcttgatttaatatttctttggttttaggatacttcataaattagccctctttcaattagtaacttactttatataactattatatattttgttatcgcttttatcaaattatatgttttatgtaataaaaaatgtgcccgaacaagcacatttttaagtaagtttaaaagaaaattttactcataataatcatgaataccaacaaacaagttgagctaactgcggcagccccaaagactgaaccgccacgcttaaagattaccttgaagttaacggaaattcccaatgcagccattgccatccctaaaaagacatatgctgcttgcactaagaagtctaaagtccgcgcagacattggtaaaaatgtaccaataatactagttaagataaatccacccaagaaccaaggaattggtaatttcttcggtgctctagtatgttctgcttcactttccgtaaccaaacgcttttggtaccaatagcccacaattaaagcaaccggtgctaaaagtaatacacgagataacttcataattagagcgctatccaaactgacttcaccaaaagcacttcccgctgcaaccgcatgagcaatttcgtgtaaagatccacccgctactaccccatattgtgtatcagttaagccaagaagcggtttgagcacgatttcaagtaatgtaaacaccgttcccatgacacaaacaacagccaccgctagaacttcgttttctctttttctgtcttcatcgcttgtctcaatttgtggtgacacgcccataacggcagctgcaccacaaactccacaaccacaagccgacaaaatagctaactcatcttcagcaccaaacttacggctaagccaataagtaagcacaattgttccactaactgccagcgccgcaaccagtatagtcttaactcctgcatcagccaacttagtcaaattgagtctaaatcctaacaagataatccctaatcttaaaaacttgttggaaataaaacccatgccagctttcgcttcagcttgtacgctctgaggcgttatttgcagtgcaatccctaataacaatgcaattaccaatgccccgattaagtttacgtatggcaatttagccaagaaaattcctgctacagaacaaaataaggtcatcgccgtagctaaccagaatgatttagttttaattatgtttgtcaacaaaaatccctccatatgtgatctgtttaatttgacaaacacaactccctttatgatgattgtaataagtatactattattttctattcttgacaaggcaaattattaataaattcacattaactaaaaataaaatattttggcattatttagttaagtaggttataatacttttgttacggagtgttggcagagtggtaatgcaccggactcgaaatccggcgaaccaagttttccttggcgcgcaggttcaaatcctgtacactccttttgtcaatatgtggaaaagaccaagtgcaatgcttggtcttttttatcttagtcatttttaatatttaaatgctacacttgctaatagcacattatttaaagatatagaaaagagattatatattatgtgtacttcaattattttcagtccacaagatcactattttggacgtaacctcgatcttgagattactttcggccaacaagttgtagttaccccacgcaattatgctttcaacttccgcaagatgcctgaaatgaagcatcattatgctatggttggtattgcacttgatgctggtaattatccgctctactttgacgcagctaatgaaaaaggtttaggcatggcaggacttaactaccctgacaatgctacctactatgatgaagttgccaataaagacaacattgcttcatttgaatttattccctggattctgggtcaatgcgcaactgtagcggatgctaaggtattacttaaaaagatcaacattgttaaccttaatttctctgacaagatgcaggcatccccacttcattggttaattgccgataagacaggtgtttcaattgtcgttgaaaccgataaagatggaatgcacgtttatgataatcctgtcggttgcctgactaacaatcctcagttttcatgtcaattatttaatttaaataattatgctgatgtttcacctgcaatgcctaagaacaacttttcaaaagaggtcaatatgaatggctacagccgtgggcttggttcacgcaatttgccaggtgggatggattcagaatcgcgctttgttcgtgtagcttttaacaagttcaacgctcctgttggtaaaagtgaggaagaaaacgtagacaattacttccatattttgcattctgttgaacaacaaaagggacttgatcaagttggccctaattcatttgaatacactatttactctgatggtaccaaccttgacaaggggattttctattacactacttatactagtcagcaaattaatgtcgttgacataaacaaagaagacctcgatgctaaggaattaatcaagtatgatatgttaactaagccaacatttaatcaccaaaactaaataattgaaaaataatgttaattttattcccggatttaaaattgaagtgcaacactaagtgttaaacaaaaaggccatgaagacctaaacttgaagtgacgaaaaatcaagaaaggaagatcttcatgaccaattcaaattctagcatttctaagcactatcatcaattaaccagcgtacaacgtggacaaattcaagcaatgctggattccggcataacttcccgtactgttatcgctcaagaagttggctgccataagtcgacaatcagtcgcgaaatcaaacgcggaagcgtcctgcaaagagacagcagctatttattgtatgagcactattacgctgatactgcacagatttattatgagaagcgtcgcaaaaactgctatcagcgcaatccattgaagcattatgctgtctttttgagaatgctctccagacgctttaaagctaaatttgatgccaccagcatcgatgagttcgttggtgaattcaaaaggactatgccaggctacccttgtcccagcacaccaaccgtctatcgctatattgatcagggcttgctggacataagcaatattgatctgcctatgaagctcaaaagacgcaggaacaagcgtcatcacagccatggcggtcacgctttgcacaagaagcatcttggcaattccattgaacagcgtcctaaggaggttgaagacagaaaagctccgctgcactgggaaggagatctggttaaaggcgtcagacgcaagaatcagcctgctttaatgactttgactgaaagaaccacacgctttgaagtagttatcaagattcctgactatcgggcaagcacatgccaaaggctgcttcaaaaggagattgacagacatcctgcctggtttaaatcaatcacgtttgacaatggctctgagtttgcggatatgaccaagatcaagggctgccagatttactttgctcacccatattctccatgggaaaggggcaccaatgagaactgcaatggtcttttgcgtcaattcttccctaagagcaagagcatgaaagacaagtcaaaagcttatgttcaacaggcaactgatgccattaaccacaaatatcgccgaatcctccaatatcacacagcagaggaactcttcaagcaatatatctcttcataacctaactgttgcacttaatttgacaattcaggtgttaattttatttaaagattagcattatttttgtttttccggttaaaatagattgtacttatatagtaattggggattttcttattaatgaataattattttgtactgctactgtctgcggcagttttgctctggcttatttttaatatcaaaaattcacgtcgtttcaatctatttgatcactggcttcaccaccaattggtcaaacgtcatgattgctacagctggcaggttatcgcttttattaatgatcctaaactaatggtcgtttgggatgtattattagcaggcctacttttaaacgaagaacgaaatctaaccgctctttgggtattaggaactctaggatttgctgacatttctggtattattctaaaaaaacttattcggcgcaagcgaccattattacattccgataaagaagatggctatagctttcccagcggtcatgttttaggtgccacaaccatgggcttaatcgtactacaactatttgccaaagatcttggaaccggatttgttattgccgtagtagctatttgggcaatggtaattttctctcgtttaagtttaaaggcccactatccttctgatgttcttggtgctactagtttagcaatcgtttgtttcagtatttcgcagcaactatttttagcgatttaaaaaggatcacgttcagcacttgagcgtgatccttattttttattcatgaaagcctaccataatgccgccttcttcagcatagaaactacataaagcatgcattggacgaatagtaatttgagcttcagggtattcctccaatattttatttttaattatttctgcatctttttcattttcgcaatgatcgattatcacttcgccaccgtgataattatcttccttcatatacttaataatttcacggatggcctttttcattccacgagccttagtaagtggctcaagttttccttctttacttgctgttccgatcaagttgattttgagcaaacctgcgattttggctacagctggtgaaacacgaccgtttaaagataaattatgtagtgattgcaaaacaaaaagcaaatgagtctgcattctaaacttagcaattgcttcttctagatctacaaagcgcatttcaccttgcagcattttctcaataccatggactatgattgctagctcaggtcccgcacttcttgaatcaactactataattttgctcaagggatgtttttcctcatacattgcttttgcctgaagggctgaagaaaaagtgccactcatcccgctggtcattgtgacgataatcgctttttctgttccttcaagtgcgtcaagccatgcttgaatacttggacaagttgttttgcctgccacattattttggttcatattggacaaaaattccttcatattcaaatcttgattatcaaggtagtcctcaccaccaaaagaaattgtcagaggcactacttccaaattacgcgccggatcattattcatattggcacttgagtcaacaattaatttaatattttccattttagattccttattttttgtatttattttaatcccggatttaaaattgaagtgcaacactaagtgttaaacaaaaaggccatgaagacctaaacttgaagtgacgaaaaatcaagaaaggaagatcttcatgaccaattcaaattctagcatttctaagcactatcatcaattaaccagcgtacaacgtggacaaattcaagcaatgctggattccggcataacttcccgtactgttatcgctcaagaagttggctgccataagtcgacaatcagtcgcgaaatcaaacgcggaagcgtcctgcaaagagacagcagctatttattgtatgagcactattacgctgatactgcacagatttattatgagaagcgtcgcaaaaactgctatcagcgcaatccattgaagcattatgctgtctttttgagaatgctctccagacgctttaaagctaaatttgatgccaccagcatcgatgagttcgttggtgaattcaaaaggactatgccaggctacccttgtcccagcacaccaaccgtctatcgctatattgatcagggcttgctggacataagcaatattgatctgcctatgaagctcaaaagacgcaggaacaagcgtcatcacagccatggcggtcacgctttgcacaagaagcatcttggcaattccattgaacagcgtcctaaggaggttgaagacagaaaagctccgctgcactgggaaggagatctggttaaaggcgtcagacgcaagaatcagcctgctttaatgactttgactgaaagaaccacacgctttgaagtagttatcaagattcctgactatcgggcaagcacatgccaaaggctgcttcaaaaggagattgacagacatcctgcctggtttaaatcaatcacgtttgacaatggctctgagtttgcggatatgaccaagatcaagggctgccagatttactttgctcacccatattctccatgggaaaggggcaccaatgagaactgcaatggtcttttgcgtcaattcttccctaagggcaagagcatgaaagacaagtcaaaagcttatgttcaacaggcaactgatgccattaaccacaaatatcgccgaatcctccaatatcacacagcagaggaactcttcaagcaatatatctcttcataacctaactgttgcacttaatttgacaattcaggtatttattttaatacatatattatagtcctttgatatagagttttttaggctgctttactaatttttaaaatgtaaaccgctttcatatgtttacaccgtcacaaagttaggctaaaatttgagatgtaaagcggagcaaaaattgttccgtatggtatgaaaaacataccataatttttgaggaggtttattaatgctcaaatcagttattgaaaatgtacacgcacttgaaattttcgactcacgtggtaacccaactgttgaagttcacgttactctttcaaacggtgtcgtaggtaaggctgaagttccatcaggtgcttcaactggtgaaaacgaagctgttgaattacgtgacggtggttcacgtcttggtggtaagggtgtttcaaaggctgttaacaacgttaacactgaaattaacgatgctcttaagggtatggacccatacaaccaaccaaagattgacaagaccatgattgacttagacggtactccaaacaagggtcgtcttggtgccaacgctatcttaggtgtatctatggctgttgcagttgcagctgctaacgatgctcaccttccattgtacagataccttggcggtactgatcttgaaatgccacaaactttccacaacgttatcaacggtggtgaacacgctgacaacggtatcgacattcaagaattcatgatcactccagttgctaagacttcattccgtgacggtttcgaaaagatcgttaacgtataccacaccttgaagaaggttcttgaagacatgggttacgaaactggtttaggtgacgaaggtggtttcgctcctaacatgaagaactcagaagaagctttgaaggctcttcacgaatcaatcatcaaggctggttacaagccaggtgaagatatcgctattgcatgtgactgtgctgcttcatacttctacaacaaggatgatcacaagtaccaccttgaaggtaaggttcttactgatgaagaattagcagattactacgacaagcttttggacgaattcccagaattaatttctatggaagacccatacgacgaaaacgatgttgacggtatggttaagttcactaagagccacaaggaccgtatccaaatcgttcttgacgacttcatttgtactaaccctgcacttttgactaaggctatcaaggaaggtgctggtaacgcttcacttatcaagttgaaccaaatcggtactgttactgaaacccttgaaactatccgtctttcacgtaagaacggttacaacactatgatttctcaccgttcaggtgaaactggtgacaccttcatcgctgacttagctgttgctgttaacggtggtcaacttaagaccggtgctccagctcgttcagaacgtgttgaaaagtacaaccgcttacttgaaatcgaagaagaacttggcgaaggcgaacgtcttgcattcttcccagacgatgttgaccacgattaatttcgagttaaccgagtacaatttcaaaaaaagcatgagaattaatttcaatgtcattaagttaagacattgacaattaagggtgcttttttagagatcgaatcatttggattcgatctctttttttgtataaaataaaggcgaaaagaccagccttttcgcctatcttatatattatacgcatggtgctagttaaatcgttttagttaataaaaaagtccaatcttgttagactcgacttgtaaatagtaataatagaaaagagtctgatctgattgaactgccttaagcttaagcgttttagccaccatttacaagttagttttaaagatttagtgataatttgtcggcactggtatcgtttgtatgcaccggctgagtttactcatcggcgaaatattgatcaaattaaaactacggacagtctgattttggctttacttatctggcaagctaagacaggaattgaatcacaaagaagattctgtgaatgtttcaattgtttatcacactcacgttttaatcggcgttcacgtcagctattgcaattgatttatcagatacggcaagaaatgaataaaaaggttgacctgaatggacatttcttgatcattgacagctttccggtacctgtttgccaaccaattcgcaactatcgtgctaaaatttttcgcggttatgccaacattggttataaggccaccaagaaaatttacttctatggtttcaaagttcatgccattgttagcgatgacggttacattcttgattatgtcgtaacaaaagcatcagttcatgatgccaaggagacagttgaactgctggaaaatgcccatccatctaattactatcttcttggcgacgaaggctatttaggcaaagaactgcatcaacagctaaaacaaatgggttatgaactttggacaccatatcgtaaaaatatgacaggagctaaaaagcacaatgatcatcaattgatggctattcgcagaacaattgaaagcgacttttcgcttctgacctattataatgccgagaacaatcgagcacgtagtctgataggctttcaaagccggttggaaattgcaattttagcttataatttggcttattgtctagaaagatttaactagcaccacgcgtatattatatattttaaaccttcaaaattattgccagaaagatggtgttaattatgaaagcccttcataagaatattctagaacgtcttgatcaaattatcaataatactggggatcatattcacgattttattaataatcctcatgcttttaccaggaaacgcactttagatgcagcgacagtccttaaaactacaattaacatgcaaggtcagaatttaaacagtgaactctttagagcttttggcgaagatgcaactaaaaagaacgataaagtagttagtacttctgcctatgttcaacgcaaaagccagctttctcctgcttgttttaaacatattctgactgtttttaatcaaaatctatttaatattcaactttttgatcatcactaccgtttgtttgccattgatggctctgactttaatcaaatctggaatccgaaatcgaataacattgtacaagcttcttctcataaaaagaaaccctattgtcaaattcacgttaatgccttatatgatctattgaataatacctaccaggattgtatttttcagcctaaatcagaaatggatgaacgcaaagcggctgttcaaatgcttaaagctttgaattgtggtccatatattgtaacaatggatcgtggctacactagtttcaatatgattgaaaactgcaatcgcctgcctaactgtcattacataatacgaactaaggctggacaaggcggagttaaagaaataacgacattgcctgatcaagaatgtgatcgtgagatttcctgcctggtaactacttctaactattactacatcacgcataaagccagtgagaatattcaccatgtccagcatcattatcgccaatatattaagtatcgctctaaaaatacccaggatctaagctgggattttggcgagttatgcacaataaaatttcgagcctgcaaatttagaattaatgatgccaaatcaggcaaagaagaatgggaagttgtgctaaccaatcttgatcgaaaaaattatccgctaaaaagaattaaagagctttatcatctgcgttggggtattgagacctccttcaagaaattgaagtattctttaggcagtgtacagttccattccaaacaagataaatttattgaaatggaaatttatgcccatatgattatgtttaatgcaatcagtcaaattgatgcacaggcctatattccgcaaaagcattgcaagtatcaatatgccatcaatttcaagcaatcatgcttgattattcagagcatgtatttggcttcttctttaacgcaagattttgaacggatccttattcagatcagctattataccattccaattagaccaggccgcaaggacaagagaaatattaagcccaaatcagctgtatattatttatatcgcgtagcttaaaaaagcagaatctgtgctatgccttatttgttgtacgaaaaaagcaccaatttaaccaattaaatgttaaatcagtgctttaaaagtctaatattaattgtcaatgtcttaacttaatgacattgaattaattttctcatgcttttttgttgcgcttttacatatttattttatcaatttgctaaaagccttatttaaagtgcgatccttaactacttttaccataattggattttcgtttttagattgatcaagcaagataattggatttttatccttcaaacagaacaagtaagtattatgccacgatttaaaatcatcattagcaatggcaagcacattatagtcatattttgttttgccaattggactgtagccgatctcaattgtttttttatttagaataaatcgattagtagtcaatactttggggtaagttgcaccctttttagtctttaaactcttttttccatcatagaattgataagtttgccctgacttttcaccccagttattaactttcctttttagtttaacagttttagcggcatcccagattctagttgctttttctttatctttcctcttatctggcttagccttctgtttaggcttaacttgttttttgtctgaaaattgcttttttactggttttgttttctttttagcaaccccggatttaaaattgaagtgcaacactaagtgttaaacaaaaaggccatgaagacctaaacttgaagtgacgaaaaatcaagaaaggaagatcttcatgaccaattcaaattctagcatttctaagcactatcatcaattaaccagcgtacaacgtggacaaattcaagcaatgctggattccggcataacttcccgtactgttatcgctcaagaagttggctgccataagtcgacaatcagtcgcgaaatcaaacgcggaagcgtcctgcaaagagacagcagctatttattgtatgagcactattacgctgatactgcacagatttattatgagaagcgtcgcaaaaactgctatcagcgcaatccattgaagcattatgctgtctttttgagaatgctctccagacgctttaaagctaaatttgatgccaccagcatcgatgagttcgttggtgaattcaaaaggactatgccaggctacccttgtcccagcacaccaaccgtctatcgctatattgatcagggcttgctggacataagcaatattgatctgcctatgaagctcaaaagacgcaggaacaagcgtcatcacagccatggcggtcacgctttgcacaagaagcatcttggcaattccattgaacagcgtcctaaggaggttgaagacagaaaagctccgctgcactgggaaggagatctggttaaaggcgtcagacgcaagaatcagcctgctttaatgactttgactgaaagaaccacacgctttgaagtagttatcaagattcctgactatcgggcaagcacatgccaaaggctgcttcaaaaggagattgacagacatcctgcctggtttaaatcaatcacgtttgacaatggctctgagtttgcggatatgaccaagatcaagggctgccagatttactttgctcacccatattctccatgggaaaggggcaccaatgagaactgcaatggtcttttgcgtcaattcttccctaagggcaagagcatgaaagacaagtcaaaagcttatgttcaacaggcaactgatgccattaaccacaaatatcgccgaatcctccaatatcacacagcagaggaactcttcaagcaatatatctcttcataacctaactgttgcacttaatttgacaattcaggtctttttagcaactgttgttttcttagctttttttacttcaccaatagttactgcatctttaccgaaataaacttgactacaaccagttaaagtcgttgctaaggtaattgcagcgagtcctattaaaatttttctattcataattgctccatttattatttcttataatattattgcataaaatagtctcattaaactttaggcaaaaaaatagagctaattttccaattagctcgcggttttttaataaatggtgacttgataacgattggaacgatctgtttcttctggtttttcagcaatcttcccaactggcactataacactcgtttgaaaggcaggatcaatgcctaattctttttgcaattcaccggcatcatttaacctaactgcaccgcccatgacataaactgaacctaatcctaagtctgttgctgccagcataatattttctgctgcacaagatgcgtctcgttcaccaaacatgctatcttttttggtattaattacaaacaataccggtgcattgtagcaagcattatcagttttttctttgatcttattgcgtaatccttcatccttaaccacaactagattcatcacatctgtttgattcatcccacaaggtgcagtttgaaaagcgacaatcaagttcttaagatcatcatctgaaatactttctttactaaaatctctaactgctcttcgattagtaaaaattgaatttaccatatatgcctccgcatttactttacatacgcgtggtgctagttaaatcgttttagttaataaaaaagtccaattagactagactcaagttgtaagtaatttaaatagaaaagagtctgatctaattgaactatctcaagcttaatcgtttttctcaccatttacaagttagttttaatcggttaaatgtgatttgtcgctcgctgtataagctttatgcgcctgatggacttaaacatcgtaaaaatgttgatcagaccaagcttcctgatagttctatcttagcgatgctcatttggcaaactgaaattggaattgaatctcaacgaagattctgtaaattcttcgttggcttatctcattctcgttttaaccgtcgagctcgaatgctcttgcctctaattcgttgtatccgtcagggttggaatcaggaagtaaaggtaggtggagaattattgattatcgacagttttccgattccagtttgtcagcctgttcgcaattatcacgttaagatcttccgtggcatagccgatattggttataaagcgacgaaaaaatctactattatggcttcaaagtccacgcaatagtgagtgatgatggctatctgcttgactacgcagttactaaggcgtcggtacatgatgcaaaagagacggtagaattgatgatcaatgctcatccaattaaccattatcttttaggagatgaaggctatttaggaaaagacttagcagccaagctaaagcgtatgggatacgtgctttggacaccatatcgtaaaaacatgaggggtgctaaaaagcataatgatcatcagttaatggcaattagaagaacaatcgaaagcgacttttctttgcttagctattacaatgctgagaataatcgagccaggagcttagtaggttttcaacaacggctagaaatagctattttagcttataatatggcatattgtctagaacgatttaactagcaccacgcgtactttacatgcttattttagcatgcaatcttttattgacaacgttttcataaatatttatgatgttcttaaaaagtatagatttttatgaggtgaataaataatggatttagcagcaattgatattggcggtacaacaatcaaaatcgcaacttggaaagacggtaaattacaggataaacatgctgttaatacgccaaaggatttaaatagtttttacgatattttgactgcagaagttaataaaattaaacaaaataccaaaataaaaggtgtcgcaatttctgcaccaggcgctgtaaatcaaaagacaggtattattggtggcactagcgcccttccatacatccataactttaaaatcgttgacgaattaaaaaagcgttttgagttacctgtttctatagaaaatgatgccaactccgctgcgttaggcgaattagcagaaggtgctggcaaaggcagtgacagcatggctttctttgttattggtacaggtattggtggtgccatcattattaatcaaaaagtctggcatggtgctcacctatttggtggtgaattcggctatatgggcattggtacaaaatctgttagtgatctggcatccccagtggcaatggctaaccgctataacgaaagaactggtaaaaaacttgatggtaaaacagtcttcgctttagcagacgaagatgatccagtagccagcgatgagcgtcaaaccttaattcattccctagccttagcaatttacaacgttcagcaaagttttgaccctgacaaaattgtaattggcggtggcatttctaataatccagaattaattccgttattgaatcgcgaaattgactatattcgcaaacaagtcaatccagcaagtattaaacctgaaattgtgctttgcagtttgaagagtaatgcaaacttacgtggcgcagttgcagattttgaacaagcacattaaatttttataattatttaattccattaaaagcccgctatgatgggctttttgttttgtatttataaaaagtatacgcgtggtgctagttaaatcgttctaggcaatatgccatattataagctaaaatggctatttctagccgctgctgaaagccagctaagctccttgctcggttattttcagcgttatagtaactgagcaaagaaaagtcgctttcaattgttcttctaattgccatcagttgatgattattatgttttttagcacctttcatgttttttcgatatggtgtccaaaggacatagcccataccttttaactcggcagctaagtcttttcctaagtagccttcatcgcctaaaagataatggttaattggatgagcattaatcatcaattctgtcgtttctttggcatcatgcactgatgctttagtgactgcgtagtcaagcaaatagccatcatcgcttactagcgcgtgcaccttgaaaccataataatagactttcttggttgctttatagccaatatcggctatgtcacggaagatcttaacacgataattacgaacaggctgacaaactggaacaggaaaactgtcaataattaaaaattctccagcaacctttacctcttgattccaagcttgacggatgcagcgaattaaaggcaaaagcatcttggctcgacgattaaagcgagaatgagataagccaacaaaaaatttacagaatcttctttgggattcaattccaatttcagtttgccaaatgagcatcgctaagatggagctgtcggaaagctttgtttgatcaatgttttttcgatgcgtaagcttatcaggcgcataaagattatatagtgaacgacaaattacatttaaacgactaaaactaacttgtaaatggtgagagaaacgattaagcttgaggtagttcaattagatcagactcttttctatttaatttacttacaacttgagtctaatccgattggacttttttattaactaaaacgatttaactagcaccacgcgtaaaaagtatatatttttatataaaaagctgtttatttttgcatgcattatgctatacttatttgtgtaaaaaaaatgaaagcacttacagagaagagaggatctagatgactgaaaagcgcaaattgccatccacattcctttggggcaactcagtttccagtatgcaaactgaaggtgcatggaatgaagatggcaaaggtctttcagtctatgatgtccgacctgctactgacaatactagtgactggcatgtagcaattgatgaatatcatagatatgacgaagacctcgacttactgaaggacatgaacatgaacatgtatcgtattcaaatttcatggtctcgtgtttgtcctgatggagacggcgacttcaatcaaaaaggtattgacttctatgatcgattagttaatgcaatgcttaaacgtggcattcaaccaatgatctgtctttaccactttgatatgccgcttaatttagccaaaaagtacaacggttttatgtcacggcacgtagttgacgcctttgtccgttttggtaaaaaaatgatcgatcatttcagtgatcgagttaaatattggattgtcttcaacgagcataatctatatttccaagatgaagtttttaatatttcaggttacgaatctggagataaaagtttggatgatatgtacactatcttccaccatacggtgatgtgtcatattcaattagcaaattacatccacgaaaatcactcagacgtaaaaattggtggaatgcttgcttaccaacaaatttatccagcaacgagtaaacctgaagacgtttgggcagcaaagcaagtacaagagtttttaaactttaatatttacgatgctgacaccggctgcggctattcaccagaagtaatgcaatatgtcaaaaatcatggcattcaaatggacattacagatgaagataaagaaattatgaagaaagctaaagctgatttcctagcattttcttactattcatcctgggttttatctagcgataaaattcctgatggtgaagctcctaaccattaccttaacaagggcggagttgagtccaaatatgttaagacaaacgattggggctgggcaattgatccactaggatttaggaatgcaactactaccgtattcctattttccctattgaaaatggtatcggcctcaaggaaacttgggacggtgagcatatgattgaagatgatgagcgtattgcttatcaccgcgaccatatcaaagcaatgaaagatgctatttttgatgacggcgccaaggtgcttggttatcttggctggggattaattgatattccaagttctcatgctgatatggaaaaacgctacggtgctgtttacgtcaacagatcaaaccacgatttaaaagatttaaaacgtgtgcctaagaaatcattctattggtttcaaaaggtacttaaagataatggagatgaattataatgactgatcaaaaacaatctgggttcagtaattttgtgaacagcaaaattctgccacccattatgaaatttgttaatactaaagctattgttgctttacagaatggtatgatctatactttgccattcattattgttggttctattttcttaattttatccaacatccctattccagcagtggctaatgcaattaatgcttctggttgggggggcaattttcaatcaagcctacaccacaacttttaacgttatggcactttggggctcaattggtattgcttatatttatgttaaaaatgaaggctatgaaccattagctggtgggcttactgcatgtgcttccttcttaatgctgcaaactttagcaatcgacagcccattaaaagccgctttaacttccggtatcaataacggtcaaatgagcggcaaggtggttgctgaaaatattgataagttacctcatgctttacaaacatttttggaagctcctgtaactggtgttatcaacatcaattggcttggtggtgacggtatgatcgctgccattatcgtaggtttgattgttggttgggcttactcagcaatgatgaaagctggttggactattaagcttcctaagcaagttccacctgcagtatctaaccaatttactgctatgattccagctggtgtaatcttaattgttactatgcttatcttcggtgcatttaataactttgcacacactgacttcttacaatgggtatacaaaaccattcaatcaccattacaaggtgtatcagattcatttggtggtgcagttgttatcgctttcttagtaccattcttctggttcttcggtgttcacggtggtttgattgttggttccattgctggttcacttcttcaagcaaactcatttgacaacgctcaattatacagagccggcaaattaactattgccaacggtgctcacgttgttactaacgaattctacaacaactttattaacttaactggttctggtattactatcggtttagttatcttcatcttaattgctgctaaatcagcacaaatgaaatcattaggtaaattggaattagtacctggtatcttcaacattaacgaaccattcctcttcggtatgcctatcgttatgaacccattccttgcaattccattcttcttaacttcaattgttgtagctatctctacttactgcgtaatcagatttggtattgttccaccattaaatggtatggctgcaccttggactacgccagccgttatttccggattcctaatcggaggttggaagatggccatttggcaagcatgtactctagtaatttctactttgatctattggccatttgctaagaagtatgacaatatcttacttaaacgtgaacaagcaaacgaaactaaataataaaagaggtatttaaaattcgctgattgtaaaattaaattgaacacttaataaaaaataaaaagtccattcggacctgtttgtactgagacgtaaaaagtagacaattaaaatattggattaatagaggcttgacttcgatactctttcggggttaagccttttaatctgctctttatcctttcgttgttatagtattcgatatattcctcgattgcttgagttaattcttgaagattatgatacttgtattcttgatcatagaacatttcagttttgagcaggccaaagaagttctccattagcccatcatccatggagttgccctttctggacatgctttgagtaataccatggagttttaaagctcgctgataacgagggctttgatactgacagccctgatcagtatgaaaaatgcagttattaagagctgtttctttggcaaaagccttgtcaagcattgtcattactaaatccatatctggatgtttggagatagtataagaaactatatcgccaccgcagccgtctagaataggcaataagtaaagcttttcattattaagatgaaattcagtgatatcagtataccattttgtgttaggcagggctgcgaagaaatcacgatgaattaaatttggagctattttgccaatagtacctttatagcttgaatatttgcgcttattgcgcctgatgcctttaagacctaatttatgcatccaatagcgaacggttttctccgtaactttccagccctctctgattaactgcaaagctactctgcgatatccatagcggccttgatgatgattaaaaatctcatggattctagcaataagctttgaccgtttaggcttggcgggctgtcgtttgataatcttgtagtatgagcttctggcaattataggtagctcagggtgctctgcaatcgcagctaatacataatttaaactaactttgaattcttgccttagatccgtaatcaccctagctatttcttctgatcttcttggtccaaggcacttagtttttttacgtattcgttcacaatacgcaatcgcaagttttcttctttcagctgctggatctctttctccagttccttgcgagatttctgcttttctttggtcacgggcagggcgtcctttctgtttgataatgacattatacccgtttttcttatattctctaatccaattgttaagcatgccaatacttttaaaccccagttccaaagacagctgtaagtatggtttattgccaaagattgcttgttcaatagttcgctgcttaaactctttggaatagctttggtttttagtagttaaaatttctattccatgcatatcaattaatctaagcatatagtctaaattagctagattcattctgtacgctttagccaattgactgattgagatattttcatctttccatttatgataaatttctattttttgttctttattaaatttagacatagtaaacattctaagctaaatagtgaattagttatccgacgggataattgattcactatttttattcttttgtagaattaaagtagtggtaaaacgatatgccctgaggtctttagacacttgatgtcgcataataaactggcagttttacttaagttttcaatagtctcttcgaagaatgtggacactagatgtcgagtttagaaaattagatctgatttcttaagtaaatacgttttactactaagttttggaggtttttattatgcaagttacttttggaattgatgtaagcaagtctacttctactgtttgtgaactaattggtgaaagcaaaaatgaactaaccattactaataatcgtcctggttttattcaattgcttcatgaattaaccgctttttctaaacatccgcaaattatttttgaagctaccggtgtttattcacgcagactgcaggcttttcttgaagactacggctatgaatatgttgttattaatccgcttaaagccaaaaaagagatgaatatggggctacgctacaacaagaccgataaaactgatgcttatcatttagctttaattcaaagactttatcgccatccggttaatcaaagcgaatcccaaacttataagcagcttaatgctttgagccgcttctatgaccagctgacaagtgacttggtaatagctaaaaatcgacttcaccaagctctacaatcgacttttcctgaaattgaaaatttattttcttctgctaaaggtaaaaattactggcaaatagttgtgcgatatcctcattgtgacttagtaagaagagaagataaaaaacagcttattaactggttaatgagcttaaaggggattgcttttaaacacgctctaaggactgcagataaattaattgaattagcttatcaagcttatccagttgtatcttgctctagcatagaagtcgagcaagtgcagtattatgcacacagattgcttaatttaagtgatcaaagagaaaatttaatcgcaagaatggttaagttagcgaagtctttgcctaatcatgatttagaaaacctagaaagcattccaggctttgcacagaccactgctgtcagagttttagcagagttaggagatttacgcagatttagtaatcctaataaaatcaatgcttttatcggaattgatccaggcagatatcagtcaggagaaatggactctaatttaagtattactaaacatggcaatgcagtcgcacgtaagttgctttatcgagctattggacaaattgataatgcagctaagacaaatccgtgtcatatagcagattattatgaaagcaaaaagctatcctctcaaaccaaagggttcaaaaagatagctattgcttcaattcataaactaatcagaaccatttatgccctgattatcaatgatcaaccatatgattacaacgtagccacacataatcaaaaagactttagtcgtaattaattgatcaagtacattataacgctaagcccaaaaatcagatatggatctgggcttatttgtcgtgtctaactaaaaaaataaatcgacactaaaagatgtttaagttgaaatttaaacaaaaaatgaagccaaacttcttattatgcttgactttacgtagaaaaagacctaaaagtgtctaacttttaggtctcagtttagtttgatagaatgtagttaccacacaacatttagaaacgaggtcaaaatggactctttacattctaccatgaatcatcacattaaaggcaagcatttatcattcgaggaaagagttattattcaattgcgtttgaaagatggctattctttgcgtgccattgcccgtgaattaaactgttccccttctactatcagttatgaggttaagcgcggtactgtagaactgtatcatggcaaagtcaaaagatataaggctactcaagggcatgatgcatatcaagctcatcgtaaaaattgtggacgtaaatcagactttctcaggaaaactcaattcatgcgctatgtccacaaacatttctttaaagacggctggtcgcttgatgtgtgcagtaatcgcgccaccgctgttggcgcatttagcagcagagatgttgtctgtactaagactctttacaattatgtcgaccaaggtctattagatatacataattacgacttgccagagaagcttaaacgcaataccaagcttcatcgtattcgcagaaataagaaaaaacttggcagaagcattgaagaacgtcctaaagaaatcaataaacgtaatgagtttggccattgggaatgcgatttagttctcggacataagagcaaagatgatgaggtgctgctaaccttatctgaacgtatgagtcgtgagttcttaattcttcgtattcctgacaagacttctgtcagtgtcatgcaggcctttaaagaactccaaaggcaatacagcgaacattggaatgatatttttaaaaccattaccactgataatggctcagagtttgcagatctttcaagcttagaagacgtatcaaatactttagtttactatgctcatccttatacatcttgtgacaagggaaccgttgaaagacataatggactcattcgcagatttattcctaagggagaggcaatagacaattattcactacaagacatcatagacattgaaacctggtgcaactctttaccaagaaagatattggcatatcatacaccagatgaaatctttgaaagagaattagatctaatctatcaagcagcttgattaaaagtgttcaatttattattgcaatttacgggtatttaaaattgaataatgaagaaaaaattgtaaatgaatttgatcgtgacggtcaccattataaaattggcgtcaaagccgatggccaagtatctgtatacttggatgatgaaactaaagctcatcatggatatcacttccctggtgttatccaaatccctaaaggaattgaaatcgatggtcaaatggttttacgactccctattgactgtgatgatgcaattgatcaaggtattaaagatttgaaataattcataaaaagagacgttgttaagctataaaaatagtaaaataatgtctcttttttactaaagtatagactttgctatataataaaaatataaatctaatatagaaatagaatggaaaagaaactgtcaaatcttttgtgtaaatagttctttctcgtaaattgattttttaattatttatttaatcaaagtaggattctaaggtgtcctgaacctgaccaaagcctttatgaattcgattgaaataacggtcattgtagctcattgcctgaataccaataaaagcatcaagcgactgttcagttggaaactctgccttaggcttagctttgcgcttgatcacattgttaaatgattcaatcatgttagtcgaataaattgaagctctgatctgcttgggatagttataaaagaccagcagatctggttctatgtctttcaagcttctgataacatggctgtaaaccttgccccatttggtatagaagtcatgcaggacagctgtggcttcttctttgtttgtctgttgatgcacctgtttgaattcgttcatgatcttttcacgatcgtcgacgcgtactttagcgcagatattgcgcatgacatgaaccaaacagcgttgaaaatgagctttaggataagtcctggccaaggctgttttcatgccaacaacaccatcagaaagaaagagttcaacttgcttcaagcctctggacttcatgttttgaagcatctctgtccagacttcaatgttctcactaggagcaatgcagtagtcaatgacttccttatgtccattaggtttaatgccaatggcaatatagactgcttcacgctcaaacgtttctcggcgcaaaggaaggtatgtcgcatccaaatagacgcagaaaaacttgtcgcttagcttgcgtttgtggtaagcctcaacctttggaatcatctgcttggaaatatttgatacctgagctggactgtaatggctgccatacatcttttcaattagatcggctatttccctggtggtcacgcccttggagtaaagcttgataatcatgctttccaagatatccgagtgctgcttgtagtcaggcagcgtgtgctgatgaaattgaccgttgcgatcccgaggcacttgcacttcaattgggccaaattgcgtatcaactttgcggaaataagcaccatttctagagttgccagtattccagccatttctggcatagggatcatagcccagaaaggcagtcaattcagcttctagcaagttattaacagcctgttgtagttctttgcgcaataaatcatttattttgtctggattgaatagagcttgagcaaaatctttggtaaaatcattcatgaaggagttcttctttctgtatgtgttttttttgttcaaaccaatcatacgagaaaggaactcctttttctaatgtttaaagaaataaatttaaggaatcattcatccttacacaaactattttacagtctcatggaaaaacatggcaaaggcaaaatatctagaagtagcaaatgaattaagaaaaagaattaaacaaggcatctacaataagcaagagcctcttcccgatcaagagacatttgctcaagaatttaatgtcagtcgcttaactgtcaaaaaagcatttgatggtcttgaacgacagggtctggtttataaacaatccggacttggcaccttcgttactggagaaattccaattaaggaaaaagttgatgctccagctaatgcattcattggtttaagaaatcaactaggcaaagatgccgttaagagtcaaattgttcatttctctgtagagtttcctgatgaacaaatgcaaagaaatcttgaaatcaagaaaacagaacccgtttacaatattctgcgattgagactttataatgataagcctcttatccttgaacatacatacatgccagttaaattggttcctgatcttgatgagagcatcttgcataaatcaatttatgattacatccataagaatcttaatttaaaatttggacacgcttatcgtaagattcgtgctaataaagcagacgaatatgatcaaaaatatttaaatgccaaaaaagatgatcctattcttgaattagaacagattatttggcttactaatggtcaacctgtcgaatattctatcagcaagaatcgttacgatacccgtgattatgtattgttagataataatcgtttttagaggtaatatatgtcatttacaaaagaatttacttggggcggcgctactgctgccaaccaatatgaaggtggatatgatgaaggctgtaaaggattaaatgccgttgacgttttaactaatggttcagcaactgaaccgcgtaaggtaacttggaaaaagcctaatggtgaaactggagctacgcctctagtttgggggcaagaatttagtctacctaaaggtgctgttccaactattttagacggttactactaccctagccaccaaggaacggacttttatcaccactatcaagaagatactaaattaatggccgacatgggctttgatgttttcaggctatcaatgaactggtccagaattttgccaaatggtgatgacgaacaacctaatgaagacggattagccttttacgataaagtatttgatgaatgtgctaagtatggcattgaaccactggtaactttatcccactatgagacacctctttctttaattacccgctacggtggctggaaagatcgccatttaatcgatgctttcgttcactactctgatatcgtgatgaagcactacaaaggcaaagttagatattggcttacttttaacgaaatcaacgccatggacatggctccttatatgggtggcggtttaatcgatggtagcgaacaaaatcgtgctcaaggtgctcacaatcaattcgtagctagcgctaaggtagttaaattagcccatgaaattgaccccaacaaccgtgttggccaaatgctagcttattctgcctactacccttacacttgtgatcctgctgatcaacttaaagtgctggaagccaagcaagagatgctcttctacagtgatgttcaaactggcggccgctaccctaactatcgtcttaagaaatatgaacgtgatgggattaagcttaatgatacaccagaagattatgaattaatcgctaaatatccagcagatttcttaagtttttcttgctatacctcaaacgttttaaccactcatgaagctgatgctaaagctaacggtaatgtttctgctggtggtgtagttaacccatatcttgagagtaatgcttggggctgggcaactgatccagatgttttacgaatcggcctaaatgagctctgggatcgttaccacaagcctctatgggtagtagaaaatggtttaggttctgctgacacccttgaaaaagatggctcaattcatgataactatcgtattgattacttacgagaccagatcaaatcaatgcgggatgctgtcacaattgatggtgtcgatttgatgggatacactacctggtcagcaatcgatcttgtctcaaatgggactggtgagatgaagaaacgttatggttttgtctatgttgatcgtgatgaccgtggcaatggctcactcaagcgttatcctaaagattcattctactggtataaaaaagctatcacctcaaatggtgaggatttagactaaaacttttatttataagtagagcctagctaaaaaatgctagactctatttttctaaaaagatatgatgaaagcataagtaatatagatgagagaaggaaaagtatgattacaattactaaacaattcaacttcaaggctaaggatttctttgattaccttgaagaacaattaattcctgctattaaaaaagctcgcggtaatgacatgccggtaacgcttgctaaaggtactaaatacgaagtagatggtgcccaagtaaaattaaccgattacgaaagaaacaaggtctatggggctcattttaagacagatcgaatggaattagtgattaattatgtcactgaagacaacgatcaaggtgtaaaaatcaccttttctgaagacatgcttagctttgaccgtgagaaacacggcaaactacaaaccatgttttacaatttccaattaaagatgggcgcaaagaaagaattaagacgaatgggtgacaatgttttagctaatattgcagcttaaaatcgccatctcagcagcaaaaagaccataactacttctaattgtgttgtagttatggtcttttttttgttcaaattaacaatcttatctatatcaaaattaatctattagttcttagtagcgtcagcctgttccttcttcaataagacattgtcatagtgcttgatgaataggaaccaaactaagaaggcaacaagtgcacaaacaattgaaagcacggcaccttgccagctagtagttgcaagataaccactcaaacccactggagttggccatggttgttgcacaataatcttaggtactaaatgtgaagttactgcgatgtaacccaccaagccagaagcaagtggagcacaaatgaatggcacaagcaagttaatgttataaacgattggcaaaccgaataacaatggttcattaatattaaaaatggcaggaaccaattcaaccttaccaatttctttcaattgagctgaacgagaaccaaaggctaaccagattgccatccctaaagtagcacctgaaccaccaataattacaaaggagttcatcggatcacctgcaaagaagtgattagcaccatttacattagcagccatattagctaaaacaattggagtatagaatgagctcatgatagtagcaccatgaattccgaaccaccataagaagtgaatcaagaaaattataatcaaaaagccccaccaagtatcagcaattgcactgataaatgagaatggaatgtaaagaacttggaaaatatcagttcctaaagttaccaaaattagttcaatcaatgcaactacaacagcaatacaaaagcctgggatcaaagcgctaaatgagttagaaacaccagatggaactgatgcaggcatttttattctccagttgtgcttaacagtgtaacggtagatctgaactgtaagccatgcaattactaatccagtgaagataccaacggcagcaattctggtaataccatttgttgaggcttcataaccgcctgccaccattttagtcttagtaaatgtagtaatacgcatggtgctagttaaatcgttttagttaataaaaaagtccaatcttgttagactcgacttgtaaatagtaataatagaaaagagtctgatctgattgaactgccttaagcttaagcgttttagccaccatttacaagttagttttaaagatttagtgataatttgtcggcactggtatcgtttgtatgcaccggctgagtttactcatcggcgaaatattgatcaaattaaaactacggacagtctgattttggctttacttatctggcaagctaagacaggaattgaatcacaaagaagattctgtgaatgtttcaattgtttatcacactcacgttttaatcggcgttcacgtcagctattgcaattgatttatcagatacggcaagaaatgaataaaaaggttgacctgaatggacatttcttgatcattgacagctttccggtacctgtttgccaaccaattcgcaactatcgtgctaaaatttttcgcggttatgccaacattggttataaggccaccaagaaaatttacttctatggtttcaaagttcatgccattgttagcgatgacggttacattcttgattatgtcgtaacaaaagcatcagttcatgatgccaaggagacagttgaactgctggaaaatgcccatccatctaattactatcttcttggcgacgaaggctatttaggcaaagaactgcatcaacagctaaaacaaatgggttatgaactttggacaccatatcgtaaaaatatgacaggagctaaaaagcacaatgatcatcaattgatggctattcgcagaacaattgaaagcgacttttcgcttctgacctattataatgccgagaacaatcgagcacgtagtctgataggctttcaaagccggttggaaattgcaattttagcttataatttggcttattgtctagaaagatttaactagcaccacgcgtgtagtaataaattgaacagcaccatttttccaaataagttccggaaaagtaatgaagaatgccattaagaacatcatcaaaccgttcatcggtaccaaatcaattttctcttctcttcgataaatatccgtgtatgaataagcaaaagtacctgcaaatactaatgccaagatacccatagtcgagttgtaaactacttggaataagccactaaagcgtcctaaagtattcgcataaaatgcggcaaatcctggaattggaaatgcttgaggcagcacattcaaaattaagaaaactgccccgataattgaaaatgaaataacgctataaccagcgtccataatagctctaacaaaacgtgaacctgcaaatttacctgcttttgcagctagcgcatctttaaaagagccagattttgaatcagccatatttctttcccccaatattctgaaacatcattaaatctgaacaaccttattatagcgaaagcgctttctaatgtaaacgctttttattgacatacgatatattttgtttttttaaaatgtatatttttgaaattacttctaataaaaaaagttcatgtaactttacatgaactattgttggtgcttcttaaaagtctctataaccttgtgataacgatcttgatcattcataatttgatgaattcggtattcgctccaaacacacaataaaatgccagctaaaaacaaagttgtcataaagaacataatactttgattttcgatgaatgggaataaatacttacccaatggcaaaaacgtcaacattataaaaagcaaatttaaagctgcttgtacttcaagataaactttgctaattgggacctctcgttttcgattatgcattttagttaactgctcaatcgaagcaatcccactataaattgtcataattgccgaaacaataatgccaagaacactatgataatttacatcaataattagccacatcaagttggtaaaaaagaaaatagtaataatatatctaattaacaaatatcgactaaaatacatatacttaatgctatcttcatgtcttgagactgtaaaatagtttgtgtaaggatgaatgattccttaaatttatttctttaaacattagaaaaaggagttcctttctcgtatgattggtttgaacaaaaaaaacacatacagaaagaagaactccttcatgaatgattttaccaaagattttgctcaagctctattcaatccagacaaaataaatgatttattgcgcaaagaactacaacaggctgttaataacttgctagaagctgaattgactgcctttctgggctatgatccctatgccagaaatggctggaatactggcaactctagaaatggtgcttatttccgcaaagttgatacgcaatttggcccaattgaagtgcaagtgcctcgggatcgcaacggtcaatttcatcagcacacgctgcctgactacaagcagcactcggatatcttggaaagcatgattatcaagctttactccaagggcgtgaccaccagggaaatagccgatctaattgaaaagatgtatggcagccattacagtccagctcaggtatcaaatatttccaagcagatgattccaaaggttgaggcttaccacaaacgcaagctaagcgacaagtttttctgcgtctatttggatgcgacataccttcctttgcgccgagaaacgtttgagcgttgaagcagtctatattgccattggcattaaacctaatggacataaggaagtcattgactactgcattgctcctagtgagaacattgaagtctggacagagatgcttcaaaacatgaagtccagaggcttgaagcaagttgaactctttctttctgatggtgttgttggcatgaaaacagccttggccaggacttatcctaaagctcattttcaacgctgtttggttcatgtcatgcgcaatatctgcgctaaagtacgcgtcgacgatcgtgaaaagatcatgaacgaattcaaacaggtgcatcaacagacaaacaaagaagaagccacagctgtcctgcatgacttctataccaaatggggcaaggtttacagccatgttatcagaagcttgaaagacatagaaccagatctgctggtcttttataactatcccaagcagatcagagcttcaatttattcgactaacatgattgaatcatttaacaatgtgatcaagcgcaaagctaagcctaaggcagagtttccaactgaacagtcgcttgatgcttttattggtattcaggcaatgagctacaatgaccgttatttcaatcgaattcataaaggctttggtcaggttcaggacaccttagaatcctactttgattaaataaataattaaaaaatcaatttacgagaaagaactatttacacaaaagatttgacagtttccatgtcttttcttagccgtctctgtctgttcttttttaatgttttgtttattcatttttcttcgtctcatttcttgcctaataattatatttaagcacaaatcaggcaaaaattatcgaaaaaaaataactcccgcattcgcaggagttattttcattttcagcgattacttatcttcttttttaagagagccagattcatacagcttttcgtaaagatcaaccatttctccagctaaatctctaaaagtgatagcattcatcaagtgatcttgagagtgaactaccaacaaagttacatgcatgtggtcgccttgagcttctttagttaacatgccggtttgtgaattgtgagcttcaagaagtgatttgtcactttccttcaacttttcacgagcacctgcaatatcgccttttttagccaagcgaattgcttcaaaggctaaactctttgcattaccaccattggcaattaaacccatagcagccattaaagtttcttgttctttttgttctggagttttcttttcttctgccataaaatctgtctcactttccttagctattttagctaattaattattcacctttgatcaatttttcagcttgtgccaaaacgttagcaccattcatcatgccgtaatcttgcatattaattacgtctaaaggaatgtccttaccgtctttacccttacctttaaccttgttttcgaagtcactcttcatgtaacttacttgaggccccagaagtacacaatcgatttcttgttgtgccatcttgtcatcagcttctgatgctgggcaagcaaagatttctgcatcaataccttgttccttagcagcagcttgcatcttagttactaagagtgaagtactcataccagcactacaatttaacatgatagtttgttcagccataataaatttcctcctgaaatttttattttatagtttaattagcttttattgatctacaccaattattataaaacgctttcattgatttgtaaacaaaaaattatacatgcacggcttagtcttaccatgcttatataatcatctcgagcaaaagatatatacttttatctcctgacagcgaatattatatatcctttgtaagcattttcaaatgcatattctcaacatgttaagaaaaatcctttacatacgcatgatttaacataaaaaataaatcatttttagcaaacgctttcaattaataaatgaatactgttagaatgtatatgtaatttattcctttacaatagaaaggaggcagaatcttgagtcgctatcaagacattgccaatgatatagaaaaagatattattgagaaaaaatatacaagaaaactacctgaacaatttgaactggcccaaaaatatcaaactagtcgggtcacagtcgttcacgccttaaagattttacaaaataaaaaattaatacggactgtcaagggacatgggacctttattacaagcaagtctattcccgacatttttcttaattctgatgtcaatgagcataccggctttactcgtcatgtcaataatgctctcgcaataaccagtaatgtgattgcctttaacattcgcaaacctagtattagtgaacgaaaagctctttgtttagaaaaagatgacgaagtttacgatattattagacaacgaattttaaataagaagccagctaaactagaatataccgtgatgcctgttagccgcatccccggtatcaccctagatattttgcacaagtcaatctactcttatattcaaaatgatcttgggcttaagatcggccgagcagatcgcattattacagctgaaaaatctgatgcatatgatatgaagtatcttgaatgtaaaaatgatgatcctgttttatgtattcagcaaaaggcattccttgaagacggacgaccttttgaaatttctgagtcacgtaatcgctatgaccgtggtgatttaacagttaatggcaaataagtgttacttgattaaaaaaatcaattatggcaaaatggctctcgtaagcgtttccaattacatacaagaaagtgaggaaaaatttaatgtattcagcaaaaatgcctaaaaactttttatggggtggtgcagttgctgcccaccaacttgaaggtgcttggaaagaaggaggaaaaggtacttctgttgctgatgtaatgaccgttggttcagctactaggccacgtgaaattactgacggtgttcttgaaggcaaaaattatcctaatcactcagccattgatttttatcatcactacaaagaagatattaaattaatggctgaaatgggcttcaaggcttttagaacttcaattgcctggacaagaatctttcctaatggtgatgaagccgaacctaacgaggagggtttaaagttctatgacgacttattcgatacttgtcatgaatacggcattgaacccgttattaccctctcccactttgaaatgccttttaatttagctaaaaactatggtggttttaccaaccgaaaagtaatcgatttcttcgttcgttttgcagaagtttgcttcaaacgctacaagaataaagttaagtactggatgacctttaacgaaattgataatcagtctgcattcaataatgatttcttgatggctactaactcaggcattttgttcaaagatggcatgactgacagagataaagaagccgccatgtatcaagcaggtcactatgaattggttgcttcagccttagctgttaagattggtcacaagattaatcctgatttccaaatcggttgtatgattaactactcacctgtacgtccgctcactccatcaagtgatgatgtccttttagctgataaatgggagcaacgccgtgactggttctcagatgtacatgtttttggtgaatatccaaatgcagttgaagcctacattgaacgaaatggctatcgtcctgatataactgatgaagataaaattgtcctaaaggaaggcaccgttgactgcgttggcttctcctactatcagactactaccgtttctagcgaaaaagttaaacctgatgaattaactgatttggctaaagctgttgctaagaatccaaccttaaagcgtagcgattggggctgggaaattgacccagaaggcttaagaattgcattaaatcaattgcaagaccgttaccacaaaccattattcatcgttgaaaatggtcttggagcttacgataaagttgaaactgatgggtcaattcacgatgactacagaattgactacttaagaaaccatatttcagaaatggaaaaggcagttgaactcgatggagttaacttaatgggctacttaccatggggctgtattgaccttgtttctgcaggtactggtcaaatagataagcgctacggctttatctacgttgataaaaacgatgctggtgaaggtacattggctcgttcacgtaaggactcattcttctggtacaagaaagttatcgaatctaacggtcaagacttagattaattaaactattaatagcaaaaaactgatattcagactttaatcattgaatatcagttttttattttataaatatttactgccttctttaatactcatttagctaaatgctctcgatgcagttcaatgaagttacgcacccaatctggattggtcttagagtaatcacgcaaagcccagccaattgccttattgataaaaaactcctgactatcaagattattttcaataattttttgtaataacgcggtgttcatcttctttttacgcaataattgatgctcaatcgcgacccttcttacccagaaatctggatcgtgcgaccacttgagcattagatcgtctactcgattatccgttaagccaacatagccataaattttgattaatgagtcaatcgtatcccaccattgctttgttctaacaaaacgctcaattttagctaaatcatcaaaaacaatatactttttcattgccaataaataatcacaggcaaaatattgcaattcgcgttgttcttcatcccatgcctggtctagcaacttccagtcaacttcttttttcttcttttcatctttcaaaaaattatgataaatcgccctacgttctggtgtttgtaggccatagaatagaaattgatttcgcatgtaaccaacaagatgattggccttttcttcatttgctcgagcgctaaattctttttttaatgtttcaatattcatgttttttattttagcacaaaaagaggtcccaaattctagagacgcttatcgtaaaaataatcatctacccgatcatttcaactaaaagcttggtagaataaaagtatctatattaagaaaggcataaacaatgaaacaaatttattttaaccatgatggtaatatcgatgatttagtatcttatctgctcttactacaagcaccagatatcaaacttttaggtgttggtgcaattgatgcagacggctacattgatcctagtgttgaagcatgtcgcaaaatgaccgatctttttaacttacgtggtgatgatttgactattgctcgttccaactcacgtgcagtcaaccaatttcctcacgagtggcggatggcaacttattcatttaattatcttcccatgctcaatgaaagtggcaagattgatacgcagcaggcaaagcttcctgctcatttagacatggtcgaaaaaattaaagaagcagacgagcctatcgctttagttatgacaggtccgttaactgacctggctcgcgctttagatgtcgatcccgacattgagaaaaacattgaaaaactttattggatgggtggttctcttgatgggcacggcaacgttgctatggttaacgctgacggtagtcaagaatggaactcgttttgggatccatacgcagttaaacgcgtatttgaatcaaatattccaattcagatggtcggattagaaagtacggaagaattaccacttaacgatgagttgcgccagcactgggcaagtttacgcaaatatcctgcaatggacttgataggacaaggctatagtctaatcgtatctataccatcagccgaactctacctttgggatgtgctaactacaatcagcgcactatatccagaagttgttgaaaccgaaacggctaaagcaagagtcatcactgatgggttaagtgcaggaagctttgtacgggatcctaaaggaagagaagtaactcttgttactaaagccaataaggatctcttcttccaaaagatggatgaaattttagaaagaaaataacaaaaaaagaggctcacgcctcttttttatattgccttaattgactttttgtaaagaattaccgcaatccaaactgaaatgaatgatggcagtatcgcaactacaaacaaatttggatctaaaaaattacctactctgatgaagtttgtaattgaagtaatatgttttatgttactaaatatcgcttgataaactgtaacatatattaacgaccactgaatataatattctaccaaagtgagtgtagttgtcgaaaacttaaaaattttgctagccagtcgcatcccccaataaacaaaaacacctgaaagtacaacaaatgctgctaacagcaaaaacaagtttcccaaattaacatggtcccattgactcatgatcaaatacgcaattaccatgaaaattaagaaattaattgttgaacaacacagctgaatgacaaataaaattgcagcctttaagaattcaaacttgtgctctgatctgaataacaaaaatactactagaataattgcagcaacgatgaaatatgtattaacgtgcacagttatctcctactttgcctgttttaaggcttcgcttgtagcctctttaaccccattggaagtaaatgttgcaccagtaacagcgtcgatatcagcagattgtttatccaaaatttcctgctttaatgttttttctgctttttgaccatactgcggcgtttccgtagataaatctaaatctacagttgaaattttattatcagctacagttaatgtcacacctacaaagcctgccatgccgcgtgcacgggcactatatgttccttcttttaacatcctttttcctcttttttataaaacaaaacattctaagctaaatagtgaattagttatccgacgggataattgattcactatttttattcttttgtagaattaaagtagtagtaaaacgatatgccctgaggtctttagacacttgatgtcgcataataaactggcagttttacttaagttttcaatagtctcttcgaagaatgtggacactagatgtcgagtttagaaaattagatctgatttcttaagtaaatacgttttactactaagttttggaggtttttattatgcaagttacttttggaattgatgtaagcaagtctacttctactgtttgtgaactaattggtgaaagcaaaaatgaactaaccattactaataatcgtcctggttttattcaattgcttcatgaattaaccgctttttctaaacatccgcaaattatttttgaagctaccggtgtttattcacgtacactgcaatcttttctggaagactatggctatgattatgtaattcttaatcctcttaaagctaaaaaagaaatggatatgggactacgtcataataagactgataaaactgatgcttatcatttagccttaattcaaagactatatcatcatccaattaatcaacttcaatctcaaacttataagcagcttaatgctttgagccgcttctatgaccagttaacagctgacttagtaatggctaaaaatcgacttcaccaagctctacaatcgacttttcctgaaattgaaaatctattttcttctgctaaaggtaaaaattactggcaaatagttgtgcgatatcctcattgtgacttagtaagaagagaagataaaaaacagcttattaactggttaatgagcttaaaggggattgcttttaaacacgctctaaggactgcagataaattaattgaattagcttatcaagcttatccagttgtatcttgctctagcatagaagtcgagcaagtgcagtattatgcacacagattgcttaatttaagtgatcaaagagaaaatttaatcgcaagaatggttaagttagcgaagtctttgcctaatcatgatttagaaaacctagaaagcattccaggctttgcacagaccactgctgtcagagttttagcagagttaggagatttacgcagatttagtaatcctaataaaatcaatgcttttatcggaattgatccaggcagatatcagtcaggagaaatggactctaatttaagtattactaaacatggcaatgcagtcgcacgtaagttgctttatcgagctattggacaaattgataatgcagctaagacaaatccgtgtcatatagcagattattatgaaagcaaaaagctatcctctcaaaccaaagggttcaaaaagatagctattgcttcaattcataaactaatcagaaccatttatgctctgattatcaatgatcaactatatgattacaacgtagccacacataaccaaaaagactttagttgtaattaattgatcaagtacattataacgctaagcccataaattaaatatagaggtgggcttatttagtatgctttctaaaaaaataaatcgccactaaaagatactcatgacaaaatttaggtaaaaaataaagccaaacaccttattgcgcttgactttacgtagaaaaatactgctatataataaatataacagtattcctaaaaaaagccacaaagatattgtgtttagtatatcatattgatatactatctcttgggtcttgattgtttttataagcccttattatgacccaagtgcaggtagtagaatccccttctacctgttttattataccacaataaataactgatgttatataaaatcttaagttcttttgaaaattttctcaaaagggcttttttcttgcactatcctttctaagttacgttaaaattgaaatggaattataaagttatatttaaagaaggtaaagcatgtatccagataataatattcttacatatttaaaatggcgtggtgacgttgacttctcaacatcgccttttaatgatattgatgcacttgttttatctattttttcttatcttgaattaccaggtattgttaaaagtaacggaacgacaattagtttagagaaggctgccaagctctattttgcagatgatcatcctcgttatgataatttgcaataccaagaactatttaaattaatggctcatgcagaccgctttaaaaatgcaaaactgtcgtattttattagtaccttaactgaacatactcaatttagtgcaatcaaaattgaactaactgatgggaccaactttattgcttttcgtgggactgacgattcactaattggctggaaagaagattttgaaattagttttaaaatcactgtagcccaacaacaagcagtaaaattgctcgaaactattctcaaagctgatgatcaagattattacttaggcggtcactcaaaaggtggcaatttagctgaatatgctgccattaatattgagcccaaattaagaaaaagaatcaaacgtatttatacctttgattcacctggaattgcagaagaagttggtgctcagctccctaataagtatttgcaaaatactctacgccgctttgtgccagactttagcgtcatcggtcgcttgtttgagtcgaaaaatattccagccactattgttggtagtactcgcaagggactaagccaacacgatgctttttcctggcaaataatcggttctaacttcgacaccagacgccaccgcaatgctcaatctcaagtatataatcaactaatcaatcaatggattggtaacgccaccctagaagaacgtgagtctttaactaatgacctcttctctgctttaagctctagcggcgcaactaagatcaacgaacttgataaaaatggttttggcggttttggtgcaattttgttttcactggctgattcatctcggcgaacccgtttcgtctttggttcattattttccagcatttggcagacgatcaagagccagcaactgaccaaagcgcttttctcaacagacacaattgttggttgggtgctggtagtattcggaatcattagtctaactctaccccaatatgcagtgcgagcttttggcgccctagttgccttcacggggattggtttcagtgttcaccaaattttaacaacggcaaaatctagtctaaaagaccgacaaaaaaacttctttattatttcgtatttagtagtttttgctttatcaaccgcgttaatttctaataaccgtctactaattttcttagctcactacttcttaggactattcttaattatctattcctacattcgaattaggcaactagtctttcgtaaattacccggaatttttcagattactattgtagcgatcgaggcattaattgcttttgctttaggaattatcgtagtggttaaccctagtgcctttaatcggagagcaattattattatcggtattttgctaattgcttacggcttcttcaagttagttggcgaattatttggccagcgcagcaaaatgcccaaaaatcatcgttaaaaaaagcttgttaacttcaatatcagttaacaagcttttttcttagcccttaataaaggtattagcctttatatgctttaaaatgttatacccgattgcacgaatatgatttttactaccataagtttgattcaaaaacattacaattccattctgattatcagtagtcagttgcatccagttaacaaagtgggtatcaccaaaattgccataagcgacttttaaagtttgattctttttcagataaaaaccacctgagtaagtattaaccttagaacttaaatgaccaagataatggaactgttttttagtcagaatcttgccattttgcataccagattggattttataataatcattagccgttgaaaatagattcccagcaccaggcaattgagaaacaacattacgattagcataggtactagcattgtaatttttaccaccagaataaagatacgcgtggtgctagttaaatcgttttagttaataaaaaagtccaatcttgttagactcaacttgtataataatagaaaagagcctgatctgattgaactgccttaagcttaagcgttttagccaccatttacaagttagttttaaagatttagtgataatttgtcggcactggtatcgtttgtatgcaccggctgagtttactcatcggcgaaatattgatcaaattaaaactacggacagtctgattttggctttacttatctggcaagctaagacaggaattgaatcacaaagaagattctgtgaatgtttcaattgtttatcacactcacgttttaatcggcgttcacgtcagctattgcaattgatttatcagatacggcaagaaatgaataaaaaggttgacctgaatggacagttcttgatcattgacagctttccggtacctgtttgccaaccaattcgaaactatcgtgctaaaatttttcgcggttatgccaacattggttataaggccaccaagaaaatttacttctatggtttcaaagttcatgccattgttagcgatgacggttacattcttgattatgtcgtaacaaaggcatcagttcatgatgccagggagacagttgaactgatagaaaatacccatccatctaattactatcttcttggcgacgaaggctatttaggcaaagaactgcatcaacagctaaaacaaatgggttacgaactttggacaccatatcgtaaaaatatgacaggagctaaaaagcacaatgatcatcaattgatggctattcgcagaacaattgaaagcgacttttcgcttctgacctattacaatgccgagaacaatcgagcacgtagtctgataggctttcaaagccggttggaaattgcaattttagcttataatttggcttattgtctagaaagatttaactagcaccacgcgtataaagatatgaaatcgcatcagtctttgaccgcggaatttgttgataaatataggtttgcttcaacttcaatgatcgaataacccgctgtttcacattagcagcataagactttcccgttactttactgataatgcctgccagcaaaacatagttagcattattgtaattaaatttactgcgtcccgtattttctcgtgcattggcttgggcaattgtccaattgatcgcgccattttcagaaaaattaactccatgattagattctgttccaattacgttaattcctgaggtatgtgtcattaactgccccaccgtaatttggtttgcatgcttcaaatttggataccagcgtgaaatcttagtattctgattgaatttcttctggtagattaactgtgtaattattgcagcagtaaccatcttttgcaaagaaccaactggataaagcaattttgtattgccatttttcagtcgtttgctgtaataaccgtagcctaagctaacacgttgagcatgcccattttttacaatttcaatgcttcctcgtaaatgatgctttttcatcatcttaagcgtatattgccgtagttgcttatttgaataactcttcgcctgcacagcatgatttgacattatcaaacacgatgaacaaaataaaatgaaagctatcccgaacttttttagtgtcttcaaaatttcaatctccttttaatcctgaactattctaccacaatcaaaaagcgcaaaatcacttttaatcatggtttgcgctttcatttttatttttttaaatttttatagtaagttcatcttaactaggtattccgcattttcaaccgtattccatgcagcacccttaagcaaattatcggctacaatccacatgttgaaggcacccttattttcataatcagggcgaatgcggccaacaaaagtttctcgcttacctgttgcattaattggttgcggataaatttgatgtttaatatcatcttccaaaacattacctggaaaggcagcaactgcatctttaatatcttgtgccgttgcagtctcatcttcaacagtaaagtagacactttccccatgagaaattgacacaggaaccctaacacaagttgcagttaccttgatatctttggcattcatgtcatttagcatgatcttctttgtttcatgaatcatcttccattcttcatgagaatagccactatcttctaaaacatcaatttgaggtaacaaattaaaggctaatgggtaatgctttttgtctcctttagtaggtaaaatatgagcatctgcttgcatgtctttaccatcaaggtaatcttgactttccttttttaattcatcaattgctgcttgccctgctcctgaagcagcttgataagtggaaacgataatttgtttcaaaccaaattttcttcgaactggttccaaagccattaccatttgaattgttgaacaatttggattggcaatgatgccgtgatgctttttcaatgcttctggattaacttcaggtacaaccagtggtacatctggttccattctaaatgctgatgtattatcaacacagacagcaccacgcttaacggcttccggcagaaacttctttgacactgcaccaccagctgaggaaagtactaaatctacaccatcaaatgatcctggtgtagtttcttcaactgtcaaatcttgatccttaaattttaaaactgtacctgctgaacgtgaggatgcgagtagctttaagcttttaactggaatcgttgattgttccaattgttcgatcattcttcttcccacggcaccagtagcacctagaattgcaacattatattctttcaccattatttttttcctcgcaaaaaattcttcattctttccatcgcttcatgtagattttcatcactggaagcatatgacattctaacgtacccttctccaccaggaccaaaagcactacctggagtaataccgacttttgcttcaaatgctaaatccagtgcaaattgcatatcatttttaccatatttagctggaatcttagcgaaaatataaaatgctccctgtggtttaactgcttgcatccccatcttagctaattcatccaacacaaaatcgcgccttctttgatatattttgcggtatttttctggatcatccaatccatgctccaaagcttcagtcgctgcagcttgagaagagtcagttgtagtcgtaaccattaaaccatggactttaccaatttgttccataatttttgccggaccagctacataacccagtcggtatcctgtcattgcatgtgacttagataatccagaaatataaattgcccgttcaggaatcacacttgcaattgaaaaatgcttaacgccataagttaaagtactgtaaatttcatcagtaattacgtacagattgtgtgcttttatcacttcagctaatgccctaatttcgctttcggtgtattcaactcctgtcggattaactgggtagtttaagataaccgccttgatattagattcttccttaagtgtactttctaatctttctggcgttaatttaaagttatcttctgacgtgttcattaatacataatctgcatctgctaaagttgcaactggccaatatagtgaaaataccggtgtaggaatagcaaccttatcaccccgattggtaattgaaaatagtgtcgcattaattgcttcagttgcgccaactgtaaccacaatttcagtttctggatcgtaaactactccacttgcttttttcaaataattgctaattgcttgcctaagttccaattttcccttttgtggcgcatagtgtgaatcattatttcgaatactttcaattgcagctgttttaacatgctcaggtgtattcatatcaggctcacccaaagtcagcttgataattccaggaatggttgaaactttattatcaaaaatcctaatccccgaagccttaacagattgaatcttcttacttaaagctaagtcatttgctaattctggcataatttttcctcttataaaatattctctaagccaataactagttcagttaattgatctactttttctaaagcaactttaaccccactcataaaggaatcacgatcaaatgaatcctgtctaatggttaaagcttcgccaggtccaccaaataaaacttgctcatgtgcaatatagccaggtaagcgtactgaatggattttaattccttgataatctccaccgcgaacattggctaaagtctcagtttcatcaggcgcagtttgatgttcaggacgattttgcgcgatcatttttgcagtagctaaagcagtgcctgaaggtgcatcttttttatctgcatgatgcatttcaataatttcaacatcagggaaatacttagcagcttcttcagcaaacttcattaataaaactgccgacattccaaaattaggtgcgattaagccacctaatttttcctttttggctagttcaatcaaagttgcttcttgatcatcactcaagccagtagttcccacaataggtttaatttgatgcgttaaagcaaaataaacattgtcatagacagctgcgggagtagtaaaatcaatccaaatatctgcagcatggtcaggaatttgacttaattggttaaaaatttgggctgttttaggtaaatgatatctttcaggctcatttactgcctttggagcaaatccagccaccaattcaaaattgggcagctgattaactaaactaacagccttttgccccattgcgccagtaaacccagctattagtacttttttaggcatctcgtcttaccaatcctttcctaaattaagtggcaacttttgcatcaatgcattagcatttaaacctaaatgctgggccaacttttctttttcctcatcacctaaagcgactaatggcaaacgacatccccctactataaatccttgagcattcaaggctgccttaacaggagctggtgaaggatacataaacaaagcctgcattttcggcgttaaccagcgttgaatcgtgcccgcttcaggataatttccttcataaagatcatcaaacattcgccgcatttgtttgcaatataaatggctagctacggaaataacgccattggctcctagtaatcttgcaggtaacgcttgcgtatcttcaccactaaataccaaaaaattaggatctttatgatcaataatgtattccatttcttctaaagatgcacattgtttgattcccttaatatttttaaggcgtgataattggactaccgtttctttttccatttttacgccagttctaccgggaatgttataaatcataattggcattttagtctgagcattaacagcactaaaatgtgcaatcatgctacgctgatcaggcttattgtacggtggcactactactaaggcataatcaattcctttaatctgtgctacctcattggtgaaggcgatagtggttgcagtgtcgttactgcccgttcctgcaataaccggaacacgtccattaacaatttgaccaaaatgctggtacaagtctatcttttcatcatgagtcagagttggcgtttctccggtcgtaccaccaactacaaagccattgcaaccttggtcaattaaataattaaccagcttttctaaactggcaaaatctattttttgattctcatcaaatggcgtaacaatcgccgttaacaaatctgcatcaattaatgttgccattttattgcctcattctattaatcaaaaatcctttgattgcatcaacgccgcgctgaatgcttttctcatcaggattaagtgtagccgtatgcaattgtgaatcaggattaccaacacctagccaaaacattgttccagggaatttagtcagcaaaaagccaaaatcttcacccgtcatttttggttcagtagtaataaagttaaccgtcggctggcttttcatatatgaaataaagttcttggttaattgtgggttattttctactggccaatatccaccttgattcaagtctaacttcacttctacaccaaagcttttctcaataccaagacagatttctttgagacgttgatcgattgtcaaaatcatattttgagttaagccacgaatcgtgccctcaattctagcttgaccagcaattacatttctaatcgtaccagcttcgattttgcctagagtaataacaccactttgaattggatctatgcttcgtgaaataatagtttgaacctgcatgatcaaacttgctgctgcaactaccgtatcatttgcatcttgcggaaaagctgcgtgtccacttttacctagaatatcaatattgacttcagttgtaccagcaaaaagtgtacccatccgacacccaatgctaccagcaggcaaagcggggttatcatgcaagccatagaactcgtcaggtttaaattgatcatgaaaaattcttttttcataagcttgcatcccaccactttggctttcctcggctggctgaaagaaaaaaagcaaattatcttgtggctgattttcactaaaatagcttaacaaacctaatgccacggtcatatgaatatcatgtccacatgcatgcattactccctcatgttttgatgaaaatgccagtccagttttttcagtaactggtaaagcatcgatatcagcacgatatcctatcgttctgtgtggttttcttcctttaactaatactagaattgcggtaggcagtgtcgacggtatctcaacttccaaataatcttgcttaaatttttgaattacctcgattaaataatcatgtgtttctttttctgctagtgctaattcaggtatttgatgtaaatgccttctaatttgaattaactcactttcacttaaaactgacattttataactttctcagattatcttctagttccgtcttactactagttttttcatcaacttttttaataattttagcaggaacgcccgctaccatcgtatgtgctggcacatcatgagtaactactgctccggctgcaataacggctccttcacctacatgaacaccctcaatcacaacagcattagccccaatcatgacattatcatcaatttgaaccggtttagctgaagcaggctcaattacaccagccaatacgctaccagctccaatatgacaatgttgtccaacaatggcacggccaccgagaactacgcccatatcaatcatggtattagccccgatttctgctccaatattaataatggcacccatcataattactgcattattaccgattaccacttgatcacgaataatagctcctggttcaattcgagcattaacttttttgaagtccaataaaggaactgctgaatttcgtgcatcattttcaatatggtaggccgtaatttgatgattttcttttaaaaatggttcaatatctttccagtcaccaaagatcgcgccagaatgagcttcagtaaaattctcaatttcctttggaaaatcaatttgtgctaaatctcctttaataaagacttttaccggtgtcttttttggtgcattaccaatgtaatcaataatactttttgcatctaactttgccatcttttttctcttttctaatttaaatatgattgatctaaatgaaccaagtcttctaaactttcacgcttaatgactaattttgctttaccattttctgcaaataccactgctggtcgaggattacgattataatttgaagccattgaatacccatatgcacctgtatccaacatcgctaacaagtctccagctttgacttgtggcaaagcttgatcttctgctaatatatcgccactctcgcaatacttaccagcaatacgaacatgttcagtcaaaggcgcttgtggatcggtggctaaaactgtttcatacttagcctgataaagtgcagggcgaatattatctcccatcccgccatcgacagtaatataagaacgataacctggaatatccttacggctacccaccgtataaaggttgtaaccggctggaccaacaattgatcttcccggttcaatatcgatttcaggtaaaggataattcattttttcagcttcagttttgatcaccttaacaatcgtcttaacaaattcttctggtcgtaatggatgatcttcttgggtatatttaatcccaaaaccgccaccaacattaataacttgtgcaagatagccatacttttctcgccaatcttgcgctactaccattaatttttgtgctcccatttcaaagccgtttaaggcaaaaatctgtgagccaatgtgagcatgaatccccaacattttcatcctaggattagctagaacttgttttaatgccttttctgcttgacctgattcaagatcaaagccaaatttactatcaatctgacctgtttgatcatattcatgggtatgtgctgaaatccctggtgcaatacgcaacatgacactaatcgtagcatcgtacttttttaaaacttgcgccaataactgaatctcatgaaaattatcaataataattttgccaacatgattttttacagccatttccaattcagttaatgatttattattaccatgaaagctaactctctccattggaaaattggcttttattgcagtaaataactcacctgctgaaactacgtcagtgtatgctccctcttctgcaataacttgatacattgcgattgctgcgaaagctttacttgcataactaacagcataggccatgttttcttcttcaaaaactttcttaaaagcccgaatttgtcgacgaatttgatcgacatcataaactactaatggcgtaccatacttttgagctaattctactatatcaactccaccaatcgttaaatggccttgctcattaatctgatctactgcaatttgtgaattcattttgttctcctgtctttttcaggcgaaacgctaataaaaaatccattgtctgcgccaaacaaacaatggattaatttctacttaatctatggtcgatagcgctccgcgaattttgttcgcgacagtccgcagtttattcaactacgccccagctcaagcctttagcatgactcagcttcggcaacctccccttttacaattcatcttcgttttgcccaactcagaattgttacttatgtcggctgcgcctcttcgattgactgtagtttacaattttataaaaacatagtcaacaaatttattataaaaatttaattttatttgtaacaatgcggcatttagagtgataaattacagtcatcacttgcaagattaaaaaataatgttagaattcaattaaatttagtctgacttttttatttaaattaatgatttctgaaaacaaaaggagttttgaaatgaaaatcgtaaagtttggtggctcttctttagctaccggtgaaagtgttgcacaagcaattcaaattattctcagcgatcctcaacgacaagtaatggttgtctctgccccaggcaaaaggaatacaacagatatcaaagttactgatctgttaatcaagtacgcagatttagccttaaagcacaagaattgtgttgaaatcgtgaataaaatttttagtcgctatcaagaaattggtcattattttggcttagctgatacggaattaagtattattaaacaaattttattagagttgcccaatcagggttatcctaacgaaaaatatcttttagctgcatttaaggcacatggtgaacggcttaatgctcgtttaattactttaattttacgccatcaaggaattaatagtcgttttcttgatccggctgaagccggtttaatcgtgactggcgagcccaatgatgccattgtcaatccagagagctacttaaatcttgaccaaattaaaattaaggctgatgaacgtatcgtatttcctggcttttttggcatgactccgtctggtaatatcgccactttttcccgtggcgggtcagacattaccggggctattctagctcgcggctttcatgctgatctctatgaaaattttacagatgtcaatgggatttttgccgctaatcctcatattattgagcatccccaatccatcaagaaaatgacttatcgcgaaatgcgagagttgtcatatgctggcttttctgtttttcacgatgaagcattgattcctgctattcaaggacagattcctatcaatgtgaaaaatactcatgatcctagcaatcctggcactatgattgtcccagaaaaggattttgtcccagataatgcaataaccggcgtaaccagccaaaaacatttttccgcattatatttgcataaatatttgctcaataaagaagctggtttcaccttacgtatattacaaattttataccaacataatattccatatgagcatatgccatctgggattgacgatattaccattatttttaacaatgattttctaaacgatcagttaattgatcaaatttgtaatgaaattcaagctacaattaatccagatcaactcgaatggattgaagattatgcaattattatggttgtcggcgaaggaatgcgacaaaaacataccatcagccgtcaaattatcgattctttaggcgatcatgatatttcaccacaaatgatcaatcagggagcttctcaaatttcaatcatgatcggtactaaaaaagaaaaggctgatgaagcagtaaaaattatttatcaaaagttttttaattagggggcattatgattaatttattcaaagttcacggttcgcaaaatcatttctttattcttgatcaaacacaattcgaacacgaattaagtgacgccgagctaaaaaattttacgcaaaagattaccaatccacaaactggactgcttcacggagcagatggcgttttagtagttaatcatcccgtgcattctaactcacttggccagatgcgtgtaatcaatgctgatggaagtgaagcatcaatgtgtggcaacggtctacgcaccgttgctcgttacctaagtgaaaaaacgggaaaagataatttcctagttgacacaatgaatgccagcttacgtgttagaagagaaaaagattttgcttctaacgtgccagcatttgcagttgagatctctcctgtacgctttaataaagaggcactcccttttgataatttaggacaagaacggattattgatgcttggttgccagaaatttatcctggattacgttttacttcaattgccgtacctaacccacatttaatttcttttgttaatcaagcagaaattaccggcccgatcttaggcattgttggtaaaaaattaaatagcaataatccctactttacagatggcgtcaatgttaatttcgcgcaaattttagataaaaataaactttttgtccgcacttacgaacggggcgttggttttaccaatgcctgtggtactggaatgtccgcgacttctcttgctcttactttaacccaccccgaaataggcaacttaaatacaccaatatcagtttataatcctggcggtatggttaaaactatcgtgcattatgaaaaaaatagttattggatcgagcttattggtaacgctacttttactcatcgaattaagctttctgaagctgacttaaggaaaggtgatttttccaatgtccagatccaaaagactgctgaacaaagtgcttatgaaaaatttattgctaatctgccaaagttcaatgacattacaactttagcgtaaaaaaatggcttgcaacacgcaagccatttttactttttaattattaatctaagtctttcaagccatgctttttcttggaaacgcgataagctactaaaccaaagaaaattggaccaaagcttgtccaaaaagcagttgcatatctatgctccaaaactggttgcaaaaccgtaaatataattccggtgcaaacaatcagctcaacaaagactactaacgcaaccgtccatttatagttagtaaacactctaaacttgcgcggataatcttttttaagaaagaatggaaatgcaccgatcaagaaaatataaggtgcagtagcggctacgttacccatatccgtcagaatttgataaaagctagtcgctgcgctaccaccgaatgagaccaccgcaattaataggcaaacgaagacagtttgagcccacatcgcattagcaggaataccgtgtttatttaatttagtcgctgccttaggccataaacgtggatcagatcccatgatgaaggatttaattggtgaataaagcaaaacaaagagagcacctgtcattcccatcaaaccagataaagcaattgctctagtaaagaatttaccaatcaataaactcgtgttaggatccaaatgaagtgcggttccaaaggctttgccaagtgtgccatatacggtatacgtaatatttccagtattggcattggctgctaaaatatctttttgataattaactgaaaagccggtcataaaaatcatcaaaacataagaaataatagtgaacaatgacccaataattaagcctttagggaaatctttttctgggtgtttcatactgtcaatcacaccaccgacggtttccatcccaccatatgcaaagactgcataaactacgaaagaaataatcgtaattggcgtttgaaaacttttattaggcgaaataataaaactttgccacccagtaatcggctgagccaattgcccatgattcataatcaagaccgttaaactagctagaataaagactgcattcattacaatcatgaaccaaccaccgattgatgacataattttaattccagttatccctctggaagacaggtacgttgatacaatcatgaataaaattgctagtacacctatcaattgagtaccatgcaagcccaaaatattccattcttgagttgtatctttgccaaaaataagggcagagattgaaatccaaagccttgaggcgcttgcaaccagccacagcacccagttagccagccatacaaaagtcccaataaaggcctatttttgtccaactgagccagctaaccatgaataaataccaccttgagcatcatgaaaagcagacccatattctgccatcattaagccagctgggaaaaagaaacagacgccagccaaaataaaccaaatgatcccagcatatgtcatttgctcataagaaacagaaacattgccaaaaccataaaccgttgtgataatcatcaacacaaggctcatagtcgtcaatgattttttagtttgtgaattttcatcatccaagataaagcctctactttctatttacactttccattttagcatcgtttatcttgaataaatttattctaattttaggctcataagaaaaaactactagttattcactagtagcccttcatttttattcattaattcttttttcaatccaattacttaattcagttacatgtaatttagtgaccgaactaaaagtcaaaacggtgacatgatcatagttgagattcaactttttctttaagcctgacatcaccttattagtttgactcttttttattttatccatcttggtacaaactaccaaaattgggatatttagatattgagcataatcatacatagcaatatcatctttggttggttcatgacgactatctactaagataattagtccctttaggttgggtctagtttctaaataatcttgaatcatttcgccaaattcttgccgcttcttctgtgaaactttggcatagccataacctggtacatcaaccaaataaaatttttcattgactttgtagaaattcaaagtttgtgtctttccaggctgtgacgaggtcctagctaagtttttacgctttaatagggtatttatcaagctggactttcccacgtttgagcggcctgctaatgcgatctcaggcaagttatctttaggatattgatcttctctaacagcactaactgcataactactgctttcaatgatcattgacacttacctgttctttattatcagtatttttgcggattacctttggcttagcgtgcttagtaattacgtccttagttacttcaacggtctcaatatcctcttcactaggagtttcatacataatatccataattgaattttcgataattgttctaagtccacgtgcacccatatttctttggattgctaagtcagcaattgccttcagagcaccatcagtaaacttcaaattaacatcatcaagtgataacaacttcttatactgcttaactaaagcattctttggttcagttagcactctgaccaaatccttactactcaatttatcaagcgtagtaataattggaattctaccaatgaattcaggaatcattccaaatttaactaagtcagctgtagtcaaatggcgtgtccaatcatctgcattaattttatctgcctcattttcagcaccaaagccaatggtctttttacctaaacgatttttaacgatttgttcaattccgtcgaatgccccaccaacaataaatagaatgttagtcgtgtccatcttaatcatttcttgttgagggtgtttacgcccaccttgaggtggaacagaggcaattgtaccttccaagatctttaataatgattgctgtacaccttcacctgaaacatcacgcgtaattgagacattctcagattttttagaaattttatcaatttcatcaatataaataatgccacgctgtgcacgttccaaatcataatcagcattttgtagtaacttaagcaaaatattttcaacgtcttcaccaacataccctgcttcagtcaaggtagttgcatcggcaattgcaaatgggacatttaaaatacgagccaaagtctgagcaagatatgtcttacctgatccagttggtccgatcattgcaatatttgatttttgtaattcagttgaagaatcaacatccatttggctaattctcttatagtgattatatacagcaactgataagacttttttagcacggtcttgaccaataacatattgatcaagttccttttttatttcaacaggcttaggtaattcacgagctgctttaagtgaatctgctcgtaattcatcgtcaataatttttttagccaagtcaacacattcattacaaatatatacaccgttaccggcaatcattttcttaacttggtcttgagttttgccacaaaaagcgcatttaatctcttcttgatctgtaaactgatttgccattatttttcctcctatatctaccaaaaatcagattatcataaattaactaatattgataaatattaagctcgaacagcaaaaaaagcggcctatagccgctctttttgagaaattagcaaatattactattacttgctttccttcttgtcatcgtcttctttgttttcaagctttgacttagcaacttgcttagcattatcagtaataagatccatagccttacgtacagtaatgtcgtggcctaacatgtcatctgataaggtgttacgtaccatcttttcatccatgttgtattctgaagcaagatccttgatttctttatcaatttcttccttagttgccttaaggtcttcagcagcaacaatagcttcaagaactaagttagttttaactctttcagctgcattcttttcaaattgtgaacgcaattgttgttcgttggtattagtcaacttgtagtaagtttgtgggtcaataccttgacgttgcatattacccaagtattggttcaattgagtatcaacatcttcttgaatcatagcatcaggaatttcatcgatagtagcgttgcttacagcaccttcaattgcagcttcttgaatagcgtcgtttgcttgttgttccttttgttccttcaagtccttcttgatcttttcctttaagtcatcaagggtgtctacagagtcatcaacgtccttagcaaattcatcgtctaacttaggaagttgctttgacttaacttcgtgaatcttagttgcaaagtgtgcttctttaccagctaaatcctttgcaccgtaatcttcagggaaagttacaactacatcaacatcatcgccggcttcatggccttcaagttgatcttcaaagccaggaataaatgcacctgaacctaattcaagtgagtagttttcagctgagccgccttcgaatggcttgtcgtcgatagtacccttgtaatcgatagtaacagtatcgcccttttcagccttacccttcttaagaacaagttctgcattttgttcacggcgcttgtcaagttcagcatcaatgtccttttggtaaacacgagtgttttgcttaagaacttcgatacccttgtagtcacctaacttaacttctggttctacagtaacagtagccttcatagtccaatccttgtccttatccattgatacaggaacaatttgtggttggccaactgctttaatacctgcttctttaacagcagcagaatatgcatttggtaatacaatatttaaggcatcttcatataatgcttcttcaccgtaatattgatcaaagatcacacgtgatacgtgaccctttctaaagccaggaacacgcaagtttttctttactcttctaaaagcttggtctaaacctaatttaatttcatcttgtgaaatatcaaaagtaagatcaccggttgtcttaccggtcttttcccatttaacagacattaattaaatacctccaatgtcaaatttgagtttgcatcttgcatactaagttatcttaccttaaaaggccgcaaaaaacaaatttaaaagaaaaaagatgcgctcctgtgaagaagtgcatctttttttaactatatcgttagaaattagtcaaggatttcagtaacctgaccggcaccaacggtacgaccaccttcacggatggtgaacttagtacccttttcgatggcagctggcttgattaacttaacagtaaattcagtgttatcaccaggcataaccatttcagtaccttctggcaattcaatttcaccagtaatatcagtggtgtggaagtagaattgtggacggtagtctgagaagaatggggtgtgacggccgccttcttccttcttcaagatataaacttgacccttgaattccttgtgggtttgaattgagcctggagcagccaatacttgaccacgaacaacttggtcacggtcaataccacgaagcaatacaccaacgttatcgccggcttcacctaagtcaagagtcttgtggaacatttccaaaccagtaacaactgacttaagaaccttgtctaccaaaccaacgatttcaacttcgtcaccgaccttaacagtaccacggtcaatacgacctgaagcaacagtaccacgaccagtgatagtaaatacgtcttcaactggcattaagaatggcttgtcagtttgacgttctggagttgggatgtattcgtcaacgatgtccatcaacttaagaatttgttcttgagcttccttgtcgccttgtaaagccttcaaagctgaaccacgaacaactggaatatcgtcaccagggtaatcgtattcagtcaacaagtcacgaacttccatttcaactaagtcgatcaattctgggtcgtcaactaaatcacacttgtttaagaaaacaacgatgtagttaacaccaacttgacgagcaagcaaaatgtgttcacgagtttgtggcataggaccatcagttgcagcaacaactaagatagcaccatccatttgtgcagcaccggtaatcatgttcttgatgtagtcggcgtggcctggagcgtccatgtgagcgtagtgacgattttcagtttcgtattctacgtgggcggtattaatagtaataccacgttccttttcttctggtgcagcatcgatttgtgagtaatcttcagccttagccaaacccttgtcagccaaaacagtagtaatagccgcagttaaagtggtcttaccgtggtcaacgtgaccgatagtaccaatgtttacgtgtggcttagttctaacgtaatgttctttttctgccattaaaatgaccctcctgtaaatttgcaagaagtccgttgagataagttaacggataattctctgttgaatattgtactactttcttcggcaaatgcctagtaaaaaagcttaagcgaaattgcctaacgaaaatatcctttgctaattatactaaatagtttgaaaatgtaaaccttttttacttattttttattgcggtaagtatttatatattttttctagtaatttttgatgactacggccatcttttctttgtaaaaatgagactaaatcactagcaaaactgtcaggctcatcaatatattggttaattttagggtaaagactgcctaataccaaattcacttctcccagcattaatggcaactgacttggactattgtgaaatttgcttccaatgctagaaataatttcacggtacttaggttctttttctagaagcagtgtattcgccggaataaagctctccatctggcctattacccaaatttcaaacttttcttcaagtcccaagcgaactaagtcttcacaaagtgacaacctaacagcaaaatctggcgttggatctaataagacgcttcgtgcaaaagctttaaaattaggcaggtttaacttatgtaaactttcataatccgactgagtaacctgttctcgttgtttaaagttttgcataatctgccgctgtttttcttcagaagctggttttaccttttctgataagtccaccccaacaagattttttagttgtagagcttcaataaaaaaattatttttagctagaatttgacagtaacttttaaatactcgctgatcagaaaaaagatcaggctcctctttaattaaagcatatgcctgatcttcttgtttattagcgcaatagagtttgcagagtttcaaaataacgtccaatgaatgctcttcacgtaatgcttcttctagattttgaatagctgcttcgagatctcccttacgctcatcttcttcagcaagtttcaataaattttgttggcttactgatgtcatttttagtctttcttattactttcttttttcttatttatttttttattttcgtctttggcatggttcttattgtcattttgtgctttttcattgcgtttctgcatagcacgatgacggttttgatttacttccatgaccacgggcaagatcactggacgacggttagttttcttgtataaaaacttctccaaatcaccgcggatatcttgcttcaattcagtccaatcaaactttttgtgttcaaaattggcctgaattgcttttttaattacatcaattgaatcactcatcaactggcgattagccttgatatagacgaaaccacgactagtgacttttggctctgcaataatctttttcttcttacggtcaattgtaacaaccgcaataaagattccgtcatctgataggacctcacgatcacgtagcacaatattaccaacatcaccaacaccagaaccgtcgatcatggtatcttcacctggtactgggtcagttaagaagaaacgcttctgcttaaagtcatattcaagacagtcaccattcttggtaatataaatatctttaggattcattccagctttaatagccaaatcacgtactacttcaagtaaacgatattcaccaattactggaattaagaattttggcttcaaggttgtaatcaaaagttgcagatcacgaccagttgcatgcccactagtatgtatatttctgcctaactggataaccgtaccgccagccttatataccaaatcactggtttcagctaccatcgtttcaaccgcatgtgacggagtagttgcaataaagaccaaatcgcccttatgaatcgtaatcatactatgacgcttcttagccattttttgtaatgagttaagtggttcacccatacgcccagtctctaatataactgtctgctcatctggcacagtcttcagatccttaactcgcatcaacaagccttcaggcacatctaaatagcctaatttcattgaagttctaacaatcttagctagatcgcggccagttaataagacgcgtttccctgttgctgctgcagcatttaaaacttcttgaacacgattcaagttagaggctttagcagctacgataattctgcctttagcatttctgaagacattagtcacaaatttaccaatatcttgttcagatgcattagggaaagatgcttctgcattagatgaatcacttaaaagcgctaaaacgcccttttgttcaatttcagctaagcgatccatatcagtccgataatttaacgcagctgttggatcaaatttaaagtcaccagtataaacaatttcacctgctggtgtatgtacatctattccaagtgaatcaggaattgagtgtgtcgtatggaagaatgaaatacttgcattcttaaaatcaatttcagtatctgcatcgattacgtggaacaaactattcttacggcgtttgttttcgcgttgtacttcaattttagcaagttcgatactcaattgtgaaccaaatactggaatatcgtatttacgcaaaatgtatggcaatgcaccaattgaatcagcatgcccatgtgttaaaaagatacctgctactcgatctccgtattgttcaaagaaatcaaggtcaggaattactacatcgataccaaataaagaactatcagggtactttaatccggcatcaagaacaaaaatttcatcattaacttgaacggcaaacatgtctttaccttgttcacgcacaccgctcaagatcataattttgatttgatcagccattatatttccttttctatctaatttttaattcttatggatctatcgatctcaacgtaaaaataatctgtttcaattttagcataaagaataaaattatgacagagacaaaaaaagccagccttttcggctagcttcattattcaatattatgtgaaaattaacgacgaagacctaacttcttgatcaattcacggtaacggttaatgtcgttgttttcaaggtaacgaagcaagttacgacggtgaccgatcttcttaagcaaaccaacgtatgagtggtggtcatgcttgtgactcttcatgtgatcagtcaagttgttgatatcagcagtcaaaagagcaacttgaacttcaacagaaccagtgtcaccttcgtgagttgcgtattccttcataatcttttctttttcagtctttgaaattgccatagttaaattcacctttcattaaataattgccgttaacaacgtttatcgtcggcgtgaacaaataaacagcgttagcggttcacaacagtcataatcatacacattattttttaaaaaagcaagcagaaattaccttgcatccgtgatatttcttaagtataatggatgaagtaaatttctaaatcattggaggtgaatttcatgccacaaatcaaatcagctatcaaacgtgttaaggctcaaaatgctactaacgaacgccgcgcttctgaattaagcaagttaagaactgctatcaagaagtttaagaacgctgttgaaagtgatagtaaggaagacgtctccaagttgcatttagaagctgaacgtgctttggataaggctgcttcaaaaggcttaatccacaagaacaaggctgctcgtgacaagagtcgtttaaacaagttagcaaacaagtaaatcttacttattactaataataaaaagaggagatctgcagtgatctcctctttttgtatactcttagacatttaagataaataatttcaaaaaattatcttctcggtaagttccatttttatatttaaattctaagtcgattgcatcccttaataaattttctagcttgtctatcttcaaccgattacgtagggctaacttaaccctatagggatgaacgcctaattcttttacaatttgtggttcgctacgacctctttgtgctaagatcttaacgaccaaaatcaattctaattgattttcaaagaccgctaataattgaattggattagtcccttcacgtaattgattatctaagcgctcaactgcttcacggtaattcttatctaaagccgactccaaaatagcgaaaatattttgtgctagggacaaatctacattttgcattactgatttttcagtaattttgttatcggtagctaccatttttagcttttgataattgcttaaaatagtgtcaattacctgatcactccgctcaattagcagctgtaaagctgactgtgtgattatatatccctcatctttgatcaaggctttagtcgttgaagcaacttcatagggcctaatttgtggctcaaccacattgaattgctttagaacagttttagtcagttttttacgcctatcaattttttcataagaagcaacaattactactacatcttctaaatcagctaagttttcaaaaatcttttgtaagtcatcaatttgtttctgtaattttttagataccttagctgttaaaaagaaaggatttttgactacaataaatttctgttcactaaataaactggattcagttaagctcgcaatcaattcatctaagccatcgctttcgcaatcgacagtcacgtgctccaaatctttaaagcgatcttccttggcatatgatctcaccaagtaatcattgagaaagtcatctgcaccccaaattaaggtatgtggattattgttatttgtatttttaaacaaagaaagtaaggtcattttttatcccgctttaaaaagtaactaaatctaggactttgcagtccgccataataccagctaatcataccacagtcttgcgttgaaacccatggtatttgctgttgagttagtgtcgttagcgtctcttgatgggggtgcccgaacctattttttcgaccagcagaaataaaaacttgcttaggatggattgcacgtaaaaagtctggattggatgatgttttactgccatgatgacccaatttaaaataatctacctgaagtttcatcctctgcataatttccttttcaccatcttgacctaaatctcctgtaaacaaccaattcttattcgctactctaaaaagcaaactcagggaatcttcattctttccttctcctgcttgatatggataaaccacattaaatgtaatctgcggttctttcacccgcattcctgcaagtaactccaataatttggtatcttttacacgaccatctaatctcttttgaaaagatggattcttaattagtccttcggccataaataatttcttaacattaacctgctctagtaatggtcctaaatcaccaacgtgatcggcatcttgatgcgaaacaaagactccatcaattgtattaattccctgacttttcaaaaatggaatagtaattcgatcaatctgaggtgtctgctttttgccactaaagtttagtttcccaccagtatcaattaaatataccttgcgaggaaatggcgtagtcactagaatactatctccttggcccacatcaatgaaggttacttgccctcgcaaaggaaaatgaatcatgctgaagaaaattacatacaagctcaacaagcccaccataattttcttactattaaagcgccagttaactttttctcttaaagaaacaattaaaataatcgttactattaatagcaacagacactgccaccaattaatttgcccaaaagttagtagtcccaacttagtagcagataattgcccaatgattttctcacctaattcaagcactttttctaataccggagcaaaatctttagtcagaccaaacgtcacaatattgaaaaaagcaattggtaaaactatccaattgaaatatggcactactaacatattaaaaattacagttaaaaaattgacctgataaaagaaaagcaatagtaatggcgttaataaaatatttaacaaaattgcttgtttaaaactgccaaacttatcagttaactgtaaacccaatgccaaaatatagctcaataaggctccagttgccagaaataaacgcggtactactaaaagatgtaaaatgcaggtcaatcccagcagatctatcgacgcaacatgatatttcttaaacttacaaattttgcctaaaaagtaggttaaactagctcttacaaagccggcttgaccattgcttagaaaaatacctagcaataaaaccaatgtacagcagacaaaagtttcttcatccgtcagtttcaagttaaaacaaaatacactaattaacaagacatagattccaacatgtaagcctgaaatgcttaacaagtgaataacacccaaatctcgataattatttagtatttcttgattttcttgagcattattttcacccaagattaattcactagcgaaaaagcctaataactgtggcatcttggcaaaatagttctgcaattcaaaacgtaattgatgcaattgatccccaaaatcagtaatcgataatagcttcatttgacaactactgtatttcaatttttggtaaatctgttttgcctgataataattctgaaaattaaactcaccaatattagttgctggctcaattgaattgcattccccattaatttctgtcactaaaatagggttcccatgcttaagcagttctttttgaacatctgttaccttgccaccaattaaaattttaccttgagcgaaattacccacacctgttaagtagtcgtctttaattcttacctgatcagggtaaattcttaattggctctgctgggttaaaacaaaattggtttttggtttacttaaaaaaatcagtaatagaaatgctccaactattagactaactatttttaaactaactcgatatttttgtactaacagtagcaaaaagtaacccagaaaaaataaagctactattttttgcaccattgttgtacaagaaaaagccaaaaaagagattgtaattagcaacaaagcggttattaagtaaaagccaacttcatttttaaacagccaattgatctttaaggctcgcaaaagttttttctcctattcctgatacctgcattaaatcttctatctttttaaaagaaccattttgttcacgataagcaataatctgttctgcctttttttgaccaattccagttaacttttgtagttccgttacattagcagtatttaagttgatcttagtgccatccccttgattacttgggctactgctactagtactcccactattttgactattatcagctgatcctgcagttgccacattttcaaccttttcacccttgtaaggaatatgaattttatcttgatccttaagcaaagtagcgcggttaatagcttttaattgtgctctagcagtagtacctccagccgcctcaattaactcctgcagacgagcaccatttttcaatgtatatactccctgatgcttcaccgcaccggaaatatcacaagttacagtcttagaaacggttgttgaactactgctagtcactgcattagtattagtggttgcacctgaactactagtgctagactgcataacttgatcctgcactgcagcagcattttcttgatgatcccctttcttcaatccataaaatccaactacaagaattattgcaccaatgagatatgcttttttctcaagcacaaattcttttactttttcaaaattcataaaaatcacctctactatttattacgcaaaaaaagcccagaattttttctagacttcaaattttttgaatttttttagtagtgtgtctttagatagtttaatgcatcatcaaaagtgctcacagggacaattttcattttggtgtgaattttctttgcggttctcttagcaaccgcataattagtttcacttttcttcacactggttgaatcagtcggcgcaaagaagacctctgcaccttctctgctagcagctaccacttttttatcaacaccaccaatgattcctacttttccggtaggtgaaatcgtacctgttcccgcaatcttatgtcccttacttaagttctgcttggtaaagacctcatagctttcaagtgtaaacatcaatccggctgaggggccaccgatttcgccagcattaatttttaacttaggcttagttttcacaactacatgctcaactaattgaatcccaattcctggcttattagtaccctttactttaacaattttgccagtaaagtgtttctcttgcttaccacgcaaaactgagattgttactcgtgcaccaatcttttgtttacgcaaataatccatcatctcttcagttgagctgaaacgatgcccgtttgcgcctaaaacggtatcaccaatttggagcttatttttaaaactagaatttttctggacttccattacataaacgcctagatattttaagctatgctggttacctgcttttttagctgcataataaattgcattctgctgacttgtttccatataccagttttgcaactcattatattgagcactagtttgacctcctagcagctccttgcttgatacacgctcatcatacggacgagtaaaactccatagatattgcaaaaccggagccggccgactagttatgctaactgtcaccaaataaaaattattcggacgtttatttgatgacttaataaactggcccacgggcattgcctcaccaggatattcaatataataatcggtcggccaaacagcaagtaccactaataaaacaaacgcaattagtgccaagagccaattacgcaagtgctttttcgattgattgtttttcttattattcatgttttagcttctctctcaatgcaatcgctgcttttttaggtaaaaacagactaacatcttcatcaaaacgagctaattccttaatcatgcttgaagctacaaaagaattttctggactcgtaaaaagcaaaactgtattcacatctggagccaattttttattaatcccagcaatctcctgttcatagcggaaatcagcactgttgcgtacaccgcgcaccataactttagcatgcaattcatgtgctaaatttacagttacttcttccggtctttctagcacttcaatattaggtatttcccttagtgcatccctgattagatcagcacgttcttcaggcgtaaacaagtatttcttagctgtattggtcatcgcaactacatatactttatcaaaaatttcagcagcctttttagcggtctccacatgcccattagtaatcggatcaaaactccctggaaataaagcgattgtcattattagtcctttcgataaatcctcacaattgtttttcctaaatggtgttctttgatcaatgaaaaaccagtaatttcacccagttctgtatgatcatcagtttctgctaccacaattgcatgatcattaagtaggttcgactttaccatctgcaacatgtccttagcgattttttctttggcatagggcggatcaagaaaaactagatcaaacttttcatcattctcagaaaataattttaatgctgcagagctgcgcatattataaacattaaaacgctgctcttccttagttaaagcaacatttttcttaataattgtacaagcagcatgattaatatcaaccagactcgcatggtcacagccccttgaaacagcttcaattcctaaggcaccactaccagcatataagtctaaaacattaccaccctgaaaaaattgtcccaatgaattaaaaagggattctttcaccttatcactggttggtcttgtccgattacttttcaaagtaaataaatttcttttagcatatttccctgaaataattctcattttagttgattctcacttttttcttgttcaagttgcaatttcttttctgctttttgggccatctcagctaattgattttcaatatgttggctatccaaatttacttcttcttcagctgaaatttcgacatgattaacaaaatccaaatgagcaatttgtcctttgatttcattgcattcgttgcgattaacataaagaacacaatatttcatttttttagaaaaataaacaatgtcaccaaaatggcgcaacttatattgatcactaactgattttaaataaataatcaatgctacccttttaattaagtgggtactttcaatttctttattgatactcatgcaactgtttcatccttttcctgtaacattttttcatttgctgaaacgttcagtactaaaccaatcgcagcagtcaagacaatcattgatgaaccaccatatgaaataaatggcagcgtaacccccgtaatcggcaacaatcctagtactgcaccgatattaaagaatgcttctgtaaaaataatagtcgtcacgccaaagcaaattaatgcgtcgaattgagaaaccgcgtgaaccccaacttccataatctgccacatcaaataaaagagtaatccaaccaataaaattgtcagaatcacacctacttcttctgctgtaatggataaaataaagtcggtatacggctctggtaagtaacctcgcttttgcatactattacctagtcctacgccaaataatcccccattgtggattgcataataggagttaactagctgggccccacctttttgctctaattcaaagggatgcaagaacgacattagtcgttggaattgataacttctttgtaaaaatccaggattccaggcaactacaataaaaaatacagctgtcactaagatcacaatcccagctaaccaagttaaagctaatttagttggaacccctgatactgaaaacattactaaagtgatcataaataaaattgctgtcccaccaaaatcaggttcaacaataaccaaacacattaaaaaagccgccaaaattgctgggtgtgacaaattatgtttgatcttacccttgactaattttccatctcttctgtctagtacatatgacaaataaatgaccagagccaatttagtaacttctagtggctgcaaattgataaagcccaagttaatccaacctacagcaccattaactgccgcactactgccatgagcaaaacgtagaaatactagccatcctaacataagtatacaaattaataaaaatccccctacaaactttggatttttaaatactttgattcttaatgcaaaaaacggaatcccaaacaaaaagaaagctactatagcatagattgcttgccgtatcccatagacatttggcttaaatccattaactaataaaatatctgaactagctgaatataccaaaattatcccaaccactactaaaataagatagggaataaaaatctggtaattaagataacgtaattttcgacgcacaagcgttgcccctttatctaaataatacttttttcattataaaacaaaaagatcatcacttctatcaagtgacgaccttttaaaatttattaaactatcttagttagcacggttacgcttcttatcagccttttgacgttctgaagtgttcaaaatcttcttacgtaaacgaatagattcgggagttacttcacaatattcatcatcatttaagaattcgatagcttcttcaagagtcaacgttctaggagtcttaatagcagcagcgtggtccttaccggcagcacgagtgttagttaagttcttacccttagttacgttaacagcaatatcacgttcacgtgatgattgtccaacaatcataccttcgtaaacttcaacaccagcaccgatgaataactcaccacgttgttctactgattgaagtgagtaagtagttgattgaccttggttaatggataccaatgcaccattacgacgacctgggttccagttctttactactggcttatatgcttcaaaggtgtggttcatgataccatatccaccagtttgtgacatgaattcattattgtaaccaatcaaaccacgtgatggaactaaaaattcaagacgagtttgaccattaccagttgattccatattcttcatctcaccttttctttgtgaaagtgagtcaataacagaaccaacatattcatctggagtatcgatttgtactgattcaaatggttcgcacatagtaccatcaatttcacggtaaataaccttaggacgtgaaagttgtaattcgaagccttcacgacgaagttcttcaaccaaaattgaaaggtgaagttcaccacgacctgaaacagtccaagcgttcaattgatcagttggttcaaccttcaaagaaacatcggtacgagtttgacgaatcaaacgatcttcaagcttcttaggagttacttgatcaccttcacgacctgcaaatggtgaatcgttggcaacaaagtccatttgaagagttggtggatcaatcttaagaagtggcaatgcttctggatgttcagctgatgcaatagtttcacccacgtagatatcattaataccactaatggcaataatatctccagccttagcttccttaatttcgttacgtttcaagccaaagtaaccaaataacttagtaacacggaagttttgagttgaaccatcacgcttcataacagtgatgttgtcactaactttaaccttaccacggtaaattctaccaacaccgatacgaccaacatagtcatcccaatcaagcatggtgatttggaattgtaatggctcatcagagttgtctactggagcaggaatattcttaataatggtatcaaagattggatccatagtttccttttgagtacttggatctggatcatatgatgaagtaccattcaaagctgatgcataaacaactgggaagtcaagctgttcatcgttggcacctaattcgatgaaaagttcaagtacatcatccaaaaccttcttaggacgagcgcctggacggtcaatcttgtttaaaacaacgataggttttacgccagcttccaaagctttctttaaaacgaaacgagtctgtggcattggaccttcataggcatcaaccaaaagcaatgcaccgtcaaccatgtgcataacacgttctacttccccaccaaagtcagcgtgacctggtgtatccaagatgttgatagtagtatccttatacttaacagcagtgttcttagacaaaatagtaataccgcgttcacgttcaatggcatttgagtccatagcacgatcttccagattcatgtgttctggcaaagtatcagattgcttcaataattggttaaccaaggtagtcttaccgtggtcaacgtgggcaatgatcgcaatgtttcttagatcgtctcttcttttttctgacaaaagtattcctccccactcttcaataaaaaaactgtgactctgtcacagtttcggtaacgcattagcgccttatcgaagtgcttttcttaaatctgtatagttacgttagtgaattttaccacctaactgcatacgggtcaacgcttaacaatcaagttaaccctggatttttttatgcaaaaacaagcaaaaactattaaactatggtaaaaatataatgtagataataatttttaaaaaggagtaattattttgatcttaatgaaagatatcgtacgtgacggtgatcccgtcttacgtcaagttgccaagcctttaacatttccatttagtgatcactataaaaaattagctgatgatatgatgcaatacttaattgattcacaagatcctaagattgctgaaaagcaccaattaagagcaggcgttggcctagccgcacctcaagtaggtgaaggtgtacaaatggctgcacttttagttcctgatgatcaaggcaaaattatctttaaagaagtttatgttaacccagagattgtctctgaatctgttcgtcaagcttgtcttagcgaaggtgaaggttgccttagtgttgatgaagttattaatggttacgttccccgccctgataaattaaccattcattactacaccgttgacggtgaagaaaaaaccattcgcttaaaggattacccagcaattgtttcttctcatgaaattgatcacttaaatggtcacttgttctatgaccgcattaataagcaggatccattcgcacttaaagaagatacagtcgtaatttcttaattgttatttaaccaaaacaaaagcctgcagatgcaggcttttttgtataaaaaaagtcactggttaactaggccagtgactcatacattgggaattaagaagattgaagagacttcttataacgagcaaatgaatttattaatcatttactacatgattatcgtacaactgatgttattttacgtcaataacattgaccaaatttgaaactgtcaaatcttttgtgtaaatagatctttctcgtaaattgattttttaattatttatttaatcaaagtaggattctaaggtgtcctgaacctgaccaaagcctttatgaattcgattgaaataacggtcattgtagctcattgcctgaatgccaataaaagcatcaagcgactgttcagttggaaactctgccttaggcttagctttgcgcttgatcacattgttaaatgattcaatcatgttagtcgaataaattgaagctctgatctgcttgggatagttataaaagaccagcagatctggttctatgtctttcaagcttctgataacatggctgtaaaccttgccccatttggtatagaagtcatgcaggacagctgtggcttcttctttgtttgtctgttgatgcacctgtttgaattcgttcatgatcttttcacgatcgtcgacgcgtactttagcgcagatattgcgcatgacatgaaccaaacagcgttgaaaatgagctttaggataagtcctggccaaggctgttttcatgccaacaacaccatcagaaagaaaaagctcaacttgctttaagcctcgggatttcatgttttgaagcatatctgtccagacttcaatgttctcgctaggtgcaatgcagtagtcaatgacctccttgtgcccattaggcttgatgccaatggcaatatagactgcttcacgctcaaatgtttctcggcgcaaaggaaggtatgtcgcatccaaatagacgcagaaaaacttgtcgcttagcttgcgtttgtggtaagcctcaacctttggaatcatctgcttggaaatatttgatacctgagctggactgtaatggctgccatacatcttttcaattagatcggctatttccctggtggtcacgcccttggagtaaagcttgataatcatgctttccaagatatccgagtgctgcttgtagtcaggcagcgtgtgctgatgaaattgaccgttgcgatcccgaggcacttgcacttcaattgggccaaattgcgtatcaactttgcggaaataagcaccatttctagagttgccagtattccagccatttctggcatagggatcatagcccagaaaggcagtcaattcagcttctaacaagttattaacagcctgttgtagctctttgcgcaataaatcatttattttgtctggattgaatagagcttgagcaaaatctttggtaaaatcattcatgaaggagttcttctttctgtatgtgtttttttgttcaaaccaatcatacgagaaaggaactcctttttctaatgtttaaagaaataaatttaaggaatcattcatccttacacaaactattttacagtctcccaaatttaatcggtaaaaatcaaaagaaacataattatatacttaactttataattatgataaaatttttatagctattgagtaatttttactctacattgaacgtttatacattaataaggagaatcatttatgatttacaaagttttgtatcaaaaagacaagattgtcaatcctcgtagagaaactacacaaactctttatatggaagcagacaacatggtcgaagcaagaagtatggttgaggacagtaccccctataacattgaactcatccaagaattaactggtaattcgttaacttacgaaaaagaacatgctgactttaagttaacaacgttcgacaagaagtaataaagagtgcgaattaaaaataatgaagtagccgtttatgcaatcggggggttgcatgaaatcggcaaaaatatgtattgtgttcagtatcaggatgaaattatcatcatggactgtggtattaaattccccgaagataacctattaggtattaattacgttatttcagactattcttacctaatcaagaatcgtaagaaaatcaaagctcttgtggttagtcacggacatgaagaccatatcggtggtattccatttttgttagaaaaaattcctgaaattcctgtctatgcgacaccatttgccctttcattaattagaggcaaattggaagaacacggaattttaaagacaactgaactacacgaagagcatgaggatactgttttgaagtttaagaaactttccgtttctttctttagaactactcactctattcctgatactttaggtattgccgttcatacaccactcggtgccgttgtctttactggtgactttaagtttgacttaacaccagtaatggatcaacctgcaccagattttcaaaagatggctcaattaggcaatgaaggtgtacttgctcttctctcagattcaactaatgctgaagtaacacaatttactaagtctgaacgatttgtagctaagtcactacataatatcatcactggaatccacggtagaattatttttgccacttttgcatctaatctttatcgtgtatcaactgctattcaagctgcaattgataccggtagaaaggttgcaatttttggacgtagtatggaaaatggcgttgataatggggtcgacttgggctacttaaatttgcctaaggatctaattgttgacgcagatgagatcaacaaactaccacctgaaaaagtaatgattttatgtactggttctcaaggtgaaccattagccgctttatcgcgaattgctaatggtactcaccgtcaaatcagcttacaacctggtgatacagtcatcttctcctctaacccaattccaggtaacacattaagtgttaaccacttaattaataagttaatggaaggcggagccgatgttattcacggaagagtaaataacgttcatacttccggacacggcggccaagaagagttaaagatgatggttcgcttagttaagcctaagtacatgattcctgttcatggtgagtacagaatgcaggttattcacacccagcttgctcaacaagccggtgtacccgctgaaaacacttttgttttatctaatggtgaagttgtctgctttggccctgatggcgctagaatcacaggacatattcctgcaggtgacgtttacgttgatacttctggtactgcagatgttggcaacgttgttgttcatgatcgtcaaattctttctgaagaaggtttagttgttgcagttgctacagttgattataagcacaagcgagtcttagctggtcctgatattctcagtcgcggatttgtctacatgcgtgaatcaactgagttaattagtcaagcgcaaaagcatgtttatcatgtgcttagaaatgaaatggctaaatcaaatagaccaaaagaaagtgacattaaaaaggcgatcaccgaaaatctttcagacttcttgtattccaagactgaacgacggcctatgattttaccaatcattatcgaaaagaaatagtaaaaaagactccttagggagtcttttattttagaaaatgaataatatgcataaaaaaattaaagttcagttattagttaatgaggtcgctgggaatggcaatgctattaaagctgataaagaattacaagatatactaaaagaaatgaatacgcgtggtgctagttaaatcgttctagacaataagccaaattataagctaaaattgcaatttccaaccggctttgaaagcctatcagactacgtgctcgattgttctcggcattgtaataggtcagaagcgaaaagtcgctttcaattgttctgcgaatagccatcaattgatgatcattgtgctttttagctcctgtcatatttttacgatatggtgtccaaagttcgtaacccatttgttttagctgttgatgcagttctttgcctaaatagccttcgtcgccaagaagatagtaattagatggatgggtattttctatcagttcaactgtctccctggcatcatgaactgatgcctttgttacgacataatcaagaatgtaaccgtcatcgctaacaatggcatgaactttgaaaccatagaagtaaattttcttggtggccttataaccaatgttggcataaccgcgaaaaattttagcacgatagtttcgaattggttggcaaacaggtaccggaaagctgtcaatgatcaagaactgtccattcaggtcaacctttttattcatttcttgccgtatctgataaatcaattgcaatagctgacgtgaacgccgattaaaacgtgagtgtgataaacaattgaaacattcacagaatcttctttgtgattcaattcctgtcttagcttgccagataagtaaagccaaaatcagactgtccgtagttttaatttgatcaatatttcgccgatgagtaaactcagccggtgcatacaaacgataccagtgccgacaaattatcactaaatctttaaaactaacttgtaaatggtggctaaaacgcttaagcttaaggcagttcaatcagatcagactcttttctattattactatttacaagtcgagtctaacaagattggacttttttattaactaaaacgatttaactagcaccacgcgtataagaatattccttttaagcgacaaaaaagtcattatcctggagaattagtcgttctagcacaaaattacgctaatttacatctctcttctgaacatgttttaatcgtagttggtggagatggctcctttaatgaagttttaaatggaataaagacttctaattatcctgagacagctattacttatttgcctgcaggaacaggcaacgattttgcccgtggtgctggattaaccgcagatcccaggcaattaatcaacaatttgctccgagatcctgaaccggaacaagttgattgtggttttttcacatcaaatattaaacaaattcctaagggttactttgttaataatttcggtattggttttgatgcctttgttgttcatcagagtaatcatgagcaattaaaaaaacacctcaatcacctcaattctggaaatatgatttatggcctaaatataatcaaggcactaattaagcaggatacctttacagtgactgttaaaactaaaaacgaaactcttcgttacggagatgcatactttgtcactactactaaccatccctactttggcggtggttttgctattttgccaaaagcggacatttacagtcaccatcttgatacagtaattgttgaaaaaccgagtttacgcaagtttctctggctttttggtaagctgatcaaagatggttcacacgttaatgcaccagaatttcattatattgaagctaaagaaatcctagttcaaaccaataaaagtgaatatgctcaaattgatggtgaagatattgaaaagcagcccttcaaagtaacatttaaagttgatcattttaatttattaaaataaggaagaattccaaattcttccttttttatatcttatctaaaatatctcttttcgaattatgattttgataatattggtcctgatcaacgaaatcatgtacttgatcataaaatttcttccaataacggtatttttgatactgcttttgccactcccgtgcttcctgcaagtaattaccaagaagtccattaatctgatcgatatgtttaatcacctgattagcatgatacaattgctcttccacctgcttttgagttaacgttgactcctgatcttcaaaaaatagaacattttcttgataatttttttcttcttgcaattgtttactattgtccatttcttctttgatagctgcaatttcgtctggctgtaatccaattccagttttagctttgactaataacgactgaatatctgccaattgcacaacatctatttccattttttgataacggttcgaatcagtcaatgtgaactcatcatctgttctacttacaaatacaaccacgtttctgattaattgatctatatttggcaagcgtctcaataaattaataatcactgggttgttgcttttttctaggacatatttaatactttctttatgcttggccacttgatcggctatctgatcataatcagcctgcacattatactgtccatttttacttgttcgtgctttggtttccaagcaaaaaatcccgctagtcgtaattatcacatgatcaatttggttactccctaaactattctttttttcatagggatatggtaacagtaaattatgaattatttctttccctgtctgcacttcacgtaaacgagaattcactaattcttctgcggcagcgcctgccaagagattgctaagatggcgcaaatcacgttgagataaaatattcataggtcgcaaatgttttatttgattcaaatgtagttcagtcattcttttctgaaatgcgtttactttttgattgtaaaccttatagccagaattaattgcccgaattcgtaaaacattttgcagagccaaagctcgtttcaaatcacgtttattattcaacaaagttttttcaactatcatagcatcatgaacagtttgtgaatcagttacttttttatgtgtaatccaagctttttgataactagcatgattttctaactcattcacatactgatttaagtcattttccaaaggcaaaattttgtttctaccttctttgactattgagccataatagcgcaaattttttgtaatttcgtctaactcattgaattcatgtttgccataatggtaagttaccttagtttctccattccaactagtcttacgccaataatgaccatccgtctcaccaaattcaactaattccgccactgaacgatctaaatagtacttaatcaaataatgacaatggcctttattgtcaaaaatgcgtcgcttaatataacccggtcgcattaattcaatgatctgaaaggtcaagttcttatgattaggaaaacggtatggtaatcttttgcctgcaattttttcaattttagttatttctttcttatctgttacagataattctatttttttcattttcttcttttttcgcttttgaaaaaaataataggttaataagcctattgttagtgtaattattgtaatatccatgttaattatccatattttggaacgtatgtttagacaacaataattataccatgattttgtataatgaaaaagccccttgttttaacaattcaaggggcttttatccttataatttgatattttccattccaatcattggatcaatttcaccagaatatattttttccgaggttagaacaaaatcttctgctacttctgctttatcggtttcattctccatttcttgagctttttcgtgctgcttgctttgatcagatttatccaatgattttgtaatacccaattgctgacaaatcttcgctgctaagccagtcttacgatcatttcccggcgtcttaaaagctgccacaaatgcccgtggatcaccaactaatactaagtttttctcagctcgcgttattgcagtatacaaaaggtttcgttttagcatcacaaaattctgcatggttagattcaagatcaccaatggaaattctgaaccttgtgatttatgaatagtgattgcataagcccgggtcagatcatttaaatcttttctagaaaaggcaacttctcttccatcaaaatctgcaatcatgcattccttggcatcatcttcatcaatgctaatgatcttaccaatttgtccattataaatatctttttcaggattattttgcaattgcagaatacgatcgccaattcggaaaacttcattatgtgcttctaataccttacttttaggctgagatgggtttaaaattgcctgaataacattattaagattagttacaccaccattgccaagatacatcgcgctaagcacttgaatatcatcttttgcaaatccacgttttaaagcaagtttaacaatttgtccaactgcatcccctactaattcgggacgacagctaataaaagaataattatttgttttcttaaacaatgcttgctgatctttaccctcattaacatcatgcgccaaagtaataatcgttgaatcatcaccctgtctatgaatctgcttcaaaatagtagttggaaacgcttgcgatttaatcaggtcactgaagacattgccagctccaaccgaaggtaactgatccttatcaccaacgaaaacaatatgccgcgtatcatgaatacttgccaaaagttgtttaaaaaggaacatgtcaaccatcgacatttcatcaacaattaagatttcaccatttaactcattcaagtcctgagtgttagtatcaccaatacctaaccccaacattcggtgaattgttttagcactgattccggtaatttcacccattcttttagctgcacgtccagtcggtgctgctagtaaaaacggaggatcttcactgtaaagagcggaggaaggaatctcagccagcttgcgtaatactaataaaattccattaatgatagtagttttacctgtacctggtccacctgtcaaaatagaaatcggttggttaactgcgtttttgatggccaacttctgtgtatcgtcgtagtgaatcttaagttccttttcagcatccttgattgcttgctctacctttttatcatcatattgttctctttttttatcttcttttttttctaccaagtttttcatcaagcgagcaatatcaacttctgtttgataaatattttgtagagcagcattctcaccatcaactattactttgccagcttcttgtaaactattaatacagctagcaattgggtcgaattgattgatttgaagcaatttacttgcttctgttaataactcagctaagcctacataagtatctccctcaccatttaaagcatcgagtaatacttgataaacagcacctttaattctacgtggatcatcactagcaatatctaattggcttcccatcatatccgcggttttaaatgcaaaacccgaaatatcattaactgctgcataaggatctttctctagttttgctaatgcttcaccatgataaagctggtaaacccgtcctgcaatacgcttattaatgccgtatttagccaattttaaaattacttctgaataagaatccatcgcatttagtcctgccaaaagactatccttttgctttctagttaaagaaagcttatcaatcttagctggactttccttcaatacatctaaggcatttagccctaattcatcaataatcgtagtcgcagcctttttaccaattccagggaacttattcgaactcaaatacttagttaaagatccctcttcatgtggcaatacttgcttatagttatttgctctaaactgcaagccaaatttttcatgcattactagtttaccctcgaagcgatagctactattaatttgaatatcgccaaaattccctgtcaccttaatatcgggacgagaataatcggataaagtgccgataatttcaacgtcaagaattttatacaagtctttactattttcaaaaacaatcccgttaaccttaccggtaaattcattcataatttttcttttccttgtcatttagcatcttcataattgaagcatactgattcattgcttgttgataatacttagcatccatctgcttagcttgagcaaaatatttttgagcctggtcacgatctttttctaatgtagtgacacctagtaaaaaataaactttcgcatttttcttattatcaggaattgccaaatacatttgctgagcctgttgattctcacccaaacttaaccaaatatcgcctagcaattcctgaattcgctcatcaatttttttgatcgtcaaagcataagctaaagctttttggccttgccctaattttaagtaagttagtgccttttgataaagagttaagtcatcattaggtatctgatctaataaagccagtgctttatcaaaatcgccttgcatgtaataacacactgccagattataatttaattcttgtggctctttaaccagatgctgggcctgctccaatagcttctgtgcttgatccaagcttccttgctcaattaaatacgtcgatagctgcaaataattagcaacttgttgtggatgctgatcgatttttttgattaaaagatgaatggcttgttctactttaccttcatcataaagttgcgctattttttgatccattataacgagtccgtcttcgataatttacgtcctaaataactagtttcattccacactaccggtttaaaagtctttccgccatctagtgtttctaagacagttaaagaggtattgctaaggccgccatttttgcgaatatctttcaatggatagcctaaaagtccacccataatagctgataatgccgcaccatgactaactgctagaatcttatcatcatcgtcaggaaatctttgtgccatttcttgagcaaatgcttttccacgagcaataacatgtggataatcctcaccatgaagttcagtcggatcatatttatctggatggtgccaaaaattatccatttgtttagggaattttttctctgcatccccaaacttcattccctccatatcgcccaaattaaactctctgagtcgttcatcgatcacaacaggtaagttagcgttcattgcatcatcgatgccctgagcggtattaaaggcccgatcaagcggactggcaaaaattcctctaaatttagttccttgcaagtgatgacctaatttttttatatcttctaagctttgtggcaaaagtggtgaatctccatgtcctccttggaagcgactagctaaattccactcagttttgccatgacgaacaaaataaatttgcattgcttaaatccccctaattgtctaatcaataagaatagtttagcacaaagaaaaaggcgttcgaaaaatcgaacgctctttttgcatattttttaaactaattgtaattgcttttcttcttggtaagcagcatcaatattaccgccacctaaacattcttcacccttgtataaaacaagtgcttgacctggtgtaactgcacgagctggctcatcaaagtaaacatcagcagtattgtctgcggcatgatacttaacagtcacgccgatatcacattgacgataacggaactttgcagtacagtgcatctcaaaatcatgatctggcttaccagtaaagaatgacatatcacttgcattcaagcgactagcatatagaagtggactatcatagccctgctctacaattaattcattcttcttaagatccttgccgaccacgaaccatggatcagttgattccttagttgagcccaagcccaagccctgtctttgaccaatggtgtagtacattaaaccagcatgctcaccaactaccttaccatcaggagtgaccatcttacctgatttagctggtaagaattcacttaaaaactttctaaagtttctctcaccaataaagcagatacctgtagaatcttttttcttcgcggtagctaaaccattagccaaagcaatctctctaacttgtggcttagttaggttagctagagggaaaataaccttactaatctgctcttgactcaattggctcaaaaagtacgtctggtccttgttaccatccttaggacgcatcatatgagtaacaccattggtatccttaacagtcttagcatagtgccccattgcaatgtagtcagcatccaagtccatcgcaaactccaagaacgacttgaacttaatctgactattgcacattacatcaggattaggggttcttcccttcttgtattcatccaagaaatattcaaaaacgcggtgccaatactctttttcaaaattaattgaataatatggaataccaatcttatcggcaaccttttttacatcttcatagtcttcagtagctgtacagacgcctgaatcatcggtatcatcccaattcttcataaagacaccaacaacatcgtagccttgttgtttaagtaaaagtgctgaaacagacgagtcaacgccaccactcatacctacaactactctagtcttgctattgtcaaccattattcaatcaatcctttacttcaagcaaaatcttacgctcctcaagatcctttaaaatataatctaaaagttctacagtaggagctaattgcttatttttaaaaatattaaccttctgcaaaccgttgcgatcagtaataaccatagttaaatgcgacaagtccttattaatggtcatctttaacttagtaggcgcgttataaggtgaatcattgtaaagaggatgttcataattaaaattacccttagctgtcttcacaaagccagcatcaatcaaagcataaagcttcaactcaagattcaaagtaaacttacgtttatcaccattaatcacaactgtatttgccataattttcctcacttatttataataagacactttctttttgaaagcaactatttatttttagattgaattctttgtacaatttttactaattcttgagcgaattgctcaatttcttcatccgtattataacgcccaaatgaaattcggatcgactcatttattcttggtgaattttctccaaaacaagcaattaaaacatgtgatggctccaaagaaccagcagtacatgctgaaccgcctgacacggcaaatccattcaaatcaagatttgtttgtaaagaagtagtagatacaccattgagatgcagattaagcacatgatgtgagtaacccggaccatacccaccattaatttcataattaatttgatgatcgtctaattcctttaaaataatgtcttgataatgagcatatttcttttgcaaagcatcacgaccaatctcggatacttcacggacagcttcgccaaagccggcaattcctggtacgttctctgttccagctcgacgtttggtttcctgctcaccgcctaaaatcaaatttggaatatcgatatccgcattttcatataaaaagcctaaaaacttaggtccattaattttatgtgcagaaacagacagaaaatcaatgttcatgtccttaacatcaattttaattgtgcccattccctgaacattgtcaacatgaaaatatgcattggagtcctttaccattgccccgatttctttgagcggcataatggtaccaacttcattgttaacggccataatcgatactaaaatagtgtctggcgttaattccttttttaactgttctaaagaaatttgcccgttttcatcgacattcaaatagacaatgttgtagccctcattttccaaacgtttcattggattaagaaccgagggatgttcgatcggcgtagtaataatctttttaccaatatttttacgagcataggcagttccaagaatcgctgtattattgctttctgaaccacctgaagtaaaaataatctctccatcttgagcattaatatcttgagcaatctggtgacgagctcgatcaattacatttctggccctacgacctaattcataggtactagaggcattaccaaaatcatttttcatttcatcggtaataatatcaattaccttgggtgacattggtgtcgttgccgcattatctaaataaatttcacgcacgtttaattcatcttttctacataatcactaattaacttagctgccttagcgccgacttccttgacaaacttgtcaaaatcattgtctgcattagcatccccattatcggaaattgcacgcatagcaaccaacggagttttaaaatgacgagcaacttgtgcaaaagcggctccttccatttctactcctaaagcttctggaaagtttttcttgattaactctttttgttcttctgattgaacaaaagtatctccagtaacaacaagcccttccttaaaatctacgtcttcttcacctaaatatttcttaaatgcttccctttcaggcgaattcaacttaaaggtagcaggctctcttggaatctgaccttctacatattcaccggcactaacacagtgagcatcgtgataggcaaaatcatttactaaaatcacatctttacgatgaacatcatcttgtaatgatccagcagaaccagtcataaaaattacatcaattttttctttagttagtaaactagtcagattcatagcggcattcactttaccgataccacttaaacctaaatatacatcattgccattaacagaaaaatgttcgaattctgttgatccgaacatttcttttgtttctgcatggaaatgatcacgataaaattcagcttcttccgccattgggacgataatcgcaatcttcaatttatttcctcatttccactataaatgaaatagtgctaatagcaccaatataattaaaacaatcactatcaggatagcacgattcaatctttttttcagtcttaaagacttctcttggcgaatcgtttccttatcactcgattgattatgctgataaaattcttgtccatccccagccagagggcgtcttctaggttcttcttcagagtcatcccgcttaaagtcaggatttacatctacttcttctgaatcattatcagaaaaggaagattttagcttattaagtaggctttttttctgccttttacgataatcagagcgtttttctaccataactaatccttattatcggtctgagcattacgcaacatcatattctcccaaacagtaattgcataaattgtctttgcatcaacaatttttccttcagccaataaagtttttaattcatctaagctataccaactagaagttaaaaattcatctgcatccagtgcccgcttatcagtcaatttagttaaggtatcacaatagaaaagatacatcttttcatcacaaaaaccaggagaagaatagaattcactgaccttttcccagtaatctgtgcgatagccaccttcttcattcagctcacgcttcattgcatcaagcggacttgcatcagtggaatcaaccaaaccagctggaatttccaaagtaatctgcttaattggttcccgccattgctttactaacaacatcttttgttcatcattaattgcaataacagccgatgcaggcttatgcttaataacttctctagttgcagtttcaccattaggaagcttaattgtacgaacagccagatccaaaatacgtccttgaaaaatctgctgtgacgagatttctgtttcctttaaatccaaaatcccagctcctttttaggctaaataaacatttacacattgcagaccatttttaccttgagctaactgatatttaactctttgacctacttgcaaagttttatagccttcctctttaattgctttatagaagacaaaatatgacttatgattacgatcatcttcaataaagccatagctactgccttcatcaaattgttttacagtacctaaccgcattaaaatccttcttgaacagcttctgggtaatctgcttcaacgattttagcacaacgaccacaaagcattggcaactttggatctacgccaatatcagttctaatcatccgacaacgaggacatacttcgccttcagcatgttcaactactacactagcattattcaattgctttgcattatcaggtgcttcaccatcagcaatagttaacttagatacaattagaatttgtctgaaatcagcatccaagtcttggagcattgccttagtttccttatctgggtaaatagttactgttgcttcaaacgatttaccaattaacttcttatttcttgcatcttctagagccttcaagacgtcatcacgcaacttcatgaatttaccccaattttcaagcaaatcatcatggttagcatattcttcaacttctggcatattagcaagttgaacgtaatcttcaggttctttcaagaagccccagatttcttccatagtgtgtggcaaaattggtgttaagatcttagccaatttaacagcagcgtcgtaaataacagtttgcattgagcgacgatcatggctgttttcaccatcaatgtaaagtacatccttagcaaaatcaagataaaatgcagaaagatcattagaaacaaagttgaagaccttcttgaagacagtagtaaaatcaaacttgtcgtaagcagcaagacagtctttaactaagtcatttaatttcacttccatgtattgatcaactgaacgaagatcagcataagcaacgcgattttcttttggatcaaaatcactagtgttggccaacatgtaacggaaggtatttctgatcttacggtaactttctgcagactgctgcaaaattcccattgagactgcaacatcagaagtagtatcagcttgagctacccaaagacgaataatttcagcacccatcttcttaattacatcgtttggtgaaattacattgccaagtgacttagacatcttgtgtcccttatcatcaagcacaaagccttgtgataatacttctttataaggtgccttaccagttactgcaacagacgtaatcaaactcgaattgaaccaaccacggtattggtcactaccttcaagataaagatcagctggatagtgtaaaccatcacgtttttccattacgcctgaccaagatgaaccagagtcgaaccaaacatcaagaatatctttttctttagtaaactcgccatttggtgaatgttctgaagtaaagccttctggcaacagttccttagctgtatgagtgtaccaagcatttgaaccttctttttcaaagatcttggcaatatggtcaatcgtttctggagtaacaattggggtaccgtcttctgcatagaagatcggcaatggtacaccccaagcacgctgacgagaaattacccagtcgccacgatctttaatcatgttgtaaagacgagtcttcccccatgaaggaataaagttagcttgttcaatttgatccagaatttgatctctaaacttagaaattgaagcaaaccattgagtagttgctctgaagacaacgggcttcttagtacgccaatcatgtgggtatgagtgagtaaagaagcttaacttgagcaaagcgccagcctttttaagcttatctgctaccaccttgttagcatcatcatagaacattcctacaagatctggatctggaatatctttagtaaagcgaccttgtgcgtccattggactgaagaccgggataccatacttttgaccaacacggtagtcatcttcaccaaaaccagtagcgttgtgaactaagccggtaccgtcatcatcagtaacataggtgtcattcattaccaaaccatattggcctacaccagtcttaccataaaggggatgcttataagtcatcccatcaaaatcagtaccttttaattgtttaagtactttgtagtccttccagcctaagtcttctgcaatggctggcaaacgatctgaaccaattacatacttcttaccgtcaacttctactaaggagtagtcaaatcttggattaacggtaatacccacgttacttggaatagtccaaggagtagtagtccaaattactaatgaaacatctgaatctaagatacctttaccatctttaattggaaaagcaacataaattctaggtgatttaatatcatggtattctacttcagcttcagctaaagtggattcacttgaccatgaccagtaaactggcttcaagcccttataaatataaccttttttatacatttctccaaagacgcgaatttcttgtgcttcaaagtcatgttgcaaggtaatatatggattatcccaatctgccataacgcctagacgcttaaagtcggccatttgcttttgaacttgttcttcagcatattgtcgacaaagctcgcgatacttagcacgatccattgtcttacggtcaacgccttgcttagctaattgttgttcaactggaagaccatgagtatcccaacctggtacatatggtgcataataaccgttcatattcttgtagcgaacaatgatgtctttagaaatcttgttcaacgcatgtcccatatgaatattaccattagcaaatggagggccatcatgtaaatcaaaacgaggcttaccttcgtttaactttaatctttgttcatataacttgttatcttcccattctttttgccattcagcttcacgaacaggtagattaccgcgcatcttaaatttagttttacctaaattaagggtatctttgattctcattaacaaaattcctttctaaaaaagaaagcctcatcctaaaattaggacgaggctaaccgtggtaccacctaaattgaacttattataagttccacttaactttgcgtaacgtgcaaataccgtttagattaattaggcagctgatcagctcttaggctcttatgctagtcttccaccatcactagctcgctgaattgccttcaagctttactgtcaatctaatatgcttattttttatagtcgtcaggaaaaacaattgttgggcctaaaggatctgatttcatttcaggcttaacattaattgtttcatgacttggactgtccccggtcattggtttaggtgcagcattttcttcattatctgcatcgtcagaatcatccggttgatccaactccaaatcatcagggccttgagaagagtttacgtcattttcatcatcattgtcaacatcttcatcttcaacgtcttcatcatcagcacttactggctccgaaccatcatctggataataacgctctaagttgaagtaatcatccaatgcatgttgccacttttcatcattcaaattatcgatttcagtctgtagcatttcttgaatattactacgaaattcactaacttgctcttttacacgcatataatccgtagaaatagtatcttgttgatgcttttggaagttaatattatcttccgcttgctttttggcatccgcaataatctgcttagcctctgcttctgctttctctctaatttcatcagcagtttgttgtgccgaaattaatgatttatttaaagaacgctttttttcgttatattcattaacttgatcttgataatcatctactttttcttgtaaatcagttaactttttatttaaagaaactacttcattcttcaagtcaaccacttgatcaagtgtatcaccataatcatcaacaatctgatctaagaagctatctacttcaagacgatcatatccattacgaccacgccgtttaaattccttgttgtgaatatccatcggggtcaattgtgtttctttgtctgccaaagtctgagcaccaccttatatttaccttttcttgtagtcgaaacatcctcaatcaaaatccgaccaaagtgtcttaaactcaagacatcgtcttctttaatcattatattagaatctgctatttcatgccaatttaatttaaccagctgactattaatcatcttttgaatttgaccgcggctttgtctgctaatacccgataatacagcatcaattcgcattgaggcaactattttcgttttttcaatcgaatcatcctcaggaaccaaaacttctttgaagctaatcggtctcagctttacttttgctctgccaatgcggtcaatttgctcttcaaaaaattccgtcatttcttttttagtgaaaaactgccattttccttgattatcattaataatatcgccaaaaatacttgtatcaatacccgaattcgccaaggtgcctaaaataacactatgatttattttagtaaatttttgcggatattcaatttcatacggctgaatctgataatcactcggtcgcagattaagccattcttcacttaaataaactcgctttttctctgcattaggatagccaccatactcttgaacaaatgcatcattaccaacaattgttcttaaaattgctcgttttcccggatccaaaaaatcagtcaaaattggctcatgcttaaaaatcagctgattaaaaagaccagtaaaatagtcaattactggtctttcctcttgattaaaatgtgggtaaaacttacttgcctgtctgcgttccattacaccatcatcctcaataaaatatcaaatatccatcttaaaacatagttttgaatgaaatataagataaataaagcaataattggcgagacatcaattccagttgaataagctaatctcgcaaatggaccttttcgaaacaaatttaaatatggatttacaaccttgtctaaaaagcgaccaacaacagaattacttagcattggtagccaactcataattgcatcaatcacgatcagcagactataaagccataaaatccacgtcagtgccaagtagattaaatttaatatattaaccattagcttaaattgtctttcttatccactaaatcactaattttgccatcagtaacaaactttggtggagttgctaaaaagattttatcaccaatacgttggatttcaccatttaatgcatatacagtacccgtgatgaaatcaacaatccgacgtgctgaactgtcttccattctgctaaaattaatcactactgctttattatttaataaattttgtgcaacatccttagcatcggaatatacccgtggttcatataaaacaatcttgcttttagccgaattcaagcctgatttaattgaaaccacattatcgcgattaactgagttcagaggcaagtcttcattttcatttttagtctgtgaggcatattcttcgtcattttctaattcatcatcattagaaattccgaaaaatcttcctaatttatcaaaagccatttatactacctccaaaactagttttcactacgatgtttaaaaaatggaatatcactgttatcatcactatcgtcctgagcgctagtttcaatttgagaaatactatcctggtcttcatcactaaaagtatcaaaaccctcataatctttcttaggctcagtaggttgggtatttcttctttgattgtcttcgctatcatttagtccccaaacactggttggatcaaccatcgtttgcttaggctgctcaggttcttgtttttcggcagcaggctgaactgtttgtggtcgatcaactggttgcttaggttcttcagccttaggagcttcttctttttctttaactggttgagccttaatttgttggctacgacctggtaattgcttagaagcagcttcttcagccttagaatcaattccagtagcgattacagttactaccacctcatcgcccaagttaggattaattgaagtaccgaaaataatgtttacatcgtcaccagcagccttagaaacaatctctgaagcatcttgagcctcaaataatgtaaggtcaggtccaccagtaatgttaagtaacacttgcttagcaccatcaatagaaacttctaataatggtgaagaaatcgccagcttagtagcttcaactgttctattttcaccgctagcacggccaattcccattaaagctgcaccttgattttccattacagtcttcacatcagcaaagtccaagtttacgtagtcagttgaagtaatcaaatcagaaataccttgaacaccttgcttcaagacattatcagcttccttgaaggcatccatcataggagtcttcttgtcaaccatttcaagcaaacgattgttagctataataaccaaagtatcaacatattgctttagctgagtaataccttctgcagcgtttttagagcgcttagggccttcaaaactgaatggacgtgtaactacgcctacagttaatgcgcccgtctcacgcgcaatttttgccactacaggagccgcaccagtaccggtaccgccacccataccagcagtaataaagatcatatctgcacccttaagtgcatcttcaatcgtttgttcactctcttctgcagctttttgtcctacttcaggatgtgaaccagcacccaacccacgggtcaacttaggccctagttgaatcttgttttcagctttgttgctgttcaaagcctgaacatcagtgtttgctgcaataaaagaaacaccttgtacgccatcgtcaatcattcggttaacagcattgccgccggcaccaccaacaccaattactttgatgacagcattcttattgtcgtctgaatcgaatgtaaaatccattaaattaaccacctttaatcaaagaatttcttaaagaaactcttcaagctattagttttttcttgcttagtattattttcatcgtctggcacagattctgttctggcagacattttgcttctattataagcttctttagcttcactttcactattagaagtcgtacttttagaaatcttggtactttttggctgagaaacggggtcttccacagcgggttcaccaaaaccatagattacgccattaacaagatagtcaacttcagacatcttatatgaatagtggacgataccataagcagctgtataaatcggattacgcataccaatttgatctggttcataaattcgggccttaacatttaacccattagcagtcagactatcaattccttgtaataggctactaccacctgtaatcacaataccacctggttgcttcaatgcattatgcttaactaaaccttttcctaaacgagtcaaaatttgttctaagcgtgcattaataatttcactaagatatacttcgtcaaccatttgctgactatttgcaccaacactattaatagcaaatttatcgttttttgaggcaaattgtggatccgcaaatccatagtccaacttaatttgttcagcatcctttttcgaaatacttaaaacagcagagatatcattagtaatatcgcttccgccttctaaatcgatgttggcatacttaatttggccatctttaataacagttgccgtacttacgccaccaccaagatcgataattaccgaaccaaaagttttttcactttcattcaatgctacacttgaaattgctaaaggcgttggcacaaagaaattattatgataaccggctctttcaatagccttcttgatattgtgcaaaggactagtaggtgcagttaataaaattccactaacacccaaggaacgtgcaatcatttttcttggatcatcaacttcagttttaccatcaatcaaaaagcgactcggcaaaaatgtaattgcttcacgatcatccttagctgctgaatgaatcgcagatctaatcgttctttttacatcatcattatttacttcttgcccttgttcaccaacattagcaaaaccagttgcagtttccagttgtaacatccctaccggaattcctgtaactacactataaatcttggcgtttgttttttctgctacaccttttaatgcacgactaattgcactagcagtttgatcaatatctactatttgaccgtgtcgcattcctgaatttggcgttgtaactgcaccgataaccttaccagaatctgcaacaacggcttttacacttgtggttcctatatctaaacccactaaaagatttgaattctccaaaattaagcccccattaatatttgccttgaaaaaattctaacataaataaacttgcaaaacagctacgatatgccataagctttcttttcactagaagttaatggtctactaaatgcacctatttctaaatcaataaggctatgtttaccagctttaattctaatagtatcataatattttagtttgctattcaaagtagcagtattgccaatcactacattaccgtccttcattactaaaataatttgtgaatttcgtctggtattcccacttaataattttacctgatttttaaatgaattaggtaaactgttaaataactttaaatcattttttaactcatctgatttattatagccaacaaaaataggtttatcttggttcacttttgtccaaggtagagctctcgtacctatttttccattatccaaaatctttcggtaagaataaccatcttttaagtaacccacggttttacgttcattaatttgtaaaatcaattgattaatatgacctaaatgaacttgtgcactttgaatttctggatatttttgggataatctttgactcaaatctttttgttgaaacaagtaatcaaaaactttatcgctagccttgatcttggataccttaacaatttctttagcaggtaaatgctctgcaccaattattttaacagtactgatattcgctaaaggtgaaatatagtatcctaaaccagctatcgccaaaactgaaaccgtcattatcagacctagcctacgtcgtaatgatcgtcgtctttctgcctgtaaatttgagagtgaggcagaaatcttggtctgcgattttcgactattcctttgttggttaaattcatgattcaagtacggagacaattctttccttggatcaatcttagttactggctttttggccatctgcctcacctacctcctagcgtgaaatttcttccatcaccttaatcacttgatcagatgcatcaggtacgcctaaagccttagaagctttgctcatttcagtagcatacttttcatcgagcaaaatatggtcaattgaagagacaaaattatttggatttaaatcatcttctggaataaccaatgctgcaccagctttttctaaatcaagcgcattcttcatttgatgattatgagttacattagggcttggaatcaaaataacgggtacacctaatgcagtaaattctgcaatacttgttgcaccagatcttgaaacaacacaagtcatttctggcaatagacctggcatgtttttaatgtatggcaaaactttaatattattaccaatatcaacattcttaattttttcttgtaccttatcaaaataaaaagtacctgttgcccaaataatttgatatggtttttgctttagcatcattaatgacttaagcataattctgttaattgctaatgctccacgggatccaccaaatactaaaacagttggcatttttggatttaatccccatgttttttcaagatcaattttttcttcgtgcaagcttaaaacttgttgtgaccgtggattacctgtcttaactagtttcttcttttctgagaattcctttgcagcatcatcaaatgtataacaaattttatccacataatgacccaaaaatttattagctaatccaaccactgaattagattcatgaatcattgttggaatatgcattttagctgcttcataaaccatagcaccgctaacgtaaccacctgtacctaaaatgacatctggtttaaagtcccgtaaaatttggcgtgcgcttttagtagcttgtaaaaatagcttgatagtctcaaagttttttaacggatgtttacggttaaagccttgaatcttaattgttttaaagttaacaccggctgctggaacaatttttgattccaatcctttttgtgtacctacaaataagatttcatcgtttttactaataccgcgttctttcaaacgttcaataattgccataattgggtaaatgtgaccgcctgtaccgccacctgtaaaaataactctcattttatttagtctttaattcctcaacaaatctaacaaagtaatcgccacgttcttcaaatgttctaaattgatcccaagaagcacatgctggtgagaacaatagtacatcgcctggttcaactaattcccaagcacgaggaacggcctcttgtagtgtattaacaattacaatgtccttaattcctgcttttctagctgcgtcagctaacaaatatctagtttcaccataaagaacaattgacttaacatgttttttaaataatggtaccaaatcatcaaaagtgaagccacggtctaacccaccagcaatcaatacttccggttgcttaaatgatggaatagctacagttgctgcttcaatattagttgacttagaatcattataaaccttgcagccatcaagtgttgttacatattgcaaacgatgcttagcgccagtaaaggtgctcaatactgcggcgatatcatcattatcagcgcccataattttagaaattgcaatagcgactaaactattttgcaaattatgaatacctggtaatttaatatcagaaatcttcataatcttttcgttttgactttcaagatattcatcgccaatgaaataatcagcattatgatctgtctcagaaaaagtttgcattttagctggtgaaacttctttttccttagccaaaatatctttttgatcataattagcaataaagtaatcattactgttttgcgttctagttacattcaactttgcattgacataattttcaaaagtcttgtgataatctaagtggacgttgttgtaaatatcaacgatcgctgcaactttaggatcaatatcagttacacccaaaagctggaaactagaaatttcaactactaaaatatcatccttagttgccttaggtacaacttcagaaatcggtacgccaatattaccaactgcataagcatgatgaccagatttttgcaaatgatggtccaaaattctttgtgtcagcattaccgtagtagtttttccatttgaaccagtcacacaaacatagggagcatcactacaacttaaggcaacttctggttcagtaataatcgggatattcaactcctcagctttttgaaccatcggattttcatagggaatacctggatttttaactaaataatcaaaatgttctttttcaagcaaatcaactggatgatgaccgccaattacgcgcacgccgcgacttttcaattcttgtgccttagcatttttctccaaatcagctttatcatttaaagttaaatttgctcctaattgcaaaaggagttcgctaacagcaaaaccacttttacccaagcctagaaccaaaatgtttttattattataagttttaatatccttcattttatgattatccccaaattactaaatacaaaatactgccaattaatccaactaaccagaagacaatatctactttccattctgaccaacccaacatttcaaagtggtgatggataggtgtcatcttaaaaatacgcttacccgtagtttggaaagaaattacttgtaaaattacactagcagtttcacaaacaaaaacaatcccaactaacaataatgaccagggacggttaagcataatactgattgttgctaaaccgccacctaaagcaagtgagccagcatcacccatgaaaattttagccggcttatggttaaaaataaagaaggcaattaaaccaccaattacactcatacaaaaggccaaaacagcaaaattcttttgtttgaatgcgatataggcatatgtaccatatgctacaactgataaacctgttgctaaaccatcaagaccatcggacaagttaacagcatttgaaaaaccaaccagccaaaaaataataaatgccacaaataaaactaagctatggacaaccccagcaaaaggaatatataacccaaattgaaaatgatcacttgtagcaatcaagacaattaaaattgcaattataatctgtaatgctaatttttgccatgcacgcaagcctaaattacgtttgaagtaaagcttaataccatcatcaaggaaaccgataataccgtagcctaagagactgattaccaaaatccaaacaactttattcaagctgtgctgcatagcagctacccaaataacagaaataactgctgcaattacaaaaacggtcccacccattgtaggtgtgccagactttttttgatgccatttaggaccttcatcacgaatttcttgtccttcgtgatgtgaccgcataaatttaatcaacaatggaataaagatcactgtcaaaaccagtgaactaactagggcaatacaacttgccaacatcatattcattctgagttactcctttaacttaatgtttaattttcttccagcttttaattctgttcctttagccacgctttgactcgcaacagtgccggtaccttttatgcttaacttaatatctgtcaaactagcaaattggtgtaaatcactataagtccatcccgtcatatcaggacaaatgatttttcctgaagtattgacaaaaatcttagacccagactctaacttttcgccactcttaactccttgattgctaatccgatcaccgctaccaattttaaccaaattaagtcctaattgcttagtttgactttcagcttgtgcaacggttttagcttttaagtttggtacttttacagtagttgatacatcatcatttttagcaatcgaaatgattctctgcatcatcggtttgaaaattgaagccaaaatcttttcagctccgcctccaattaagtgtggttgcttaattgtcaaataaatacagtaacgtggtttacttgctggataaataccaacaacagagaaaatataattactatcaccctttagataacctccacctttagggttagcaatctgcgcagtccccgtcttaacagcaatatcggcgtttcccatcttataagcagaaccagttcctgattgcttattaagtacctttctcatgttagccacaattacttttctggttttagcactatatactggagtaccaacttttttaatctgatagccttgaattgtattgccatcagagtcagtaattttattaaccaactgtggctttaccatttgaccattattagccaaagaactataagcttgcatcatttgcattacattcacagtaacgccttgaccaaaagcagtaattgcttggtcaactggtgttttaaacgaaatcatccccggctgctcacctggaagactgactcccgtcttttcaccaattctgaacttcctcaagtacttcttccaagtcttagcacccatcttttgttctaacttaacaaaaccagtgttacttgaacgttcaaaagcttgagaaaatggaattgtgccccaacctgaagtcagccagtcatggatagtcgaaccagcaatattaacagaaccagaccggtaatactcattagggttgtaattgccactgttgactactgcagcgaatgacaaaatcttgaaaactgatcctggttcataagtatcttggaccaagatatcccgatacgacttagttaatcccttcatagtttgaggattaaaagtagggcgttgagaagttgccaaaattttcccagtcttcatgtcttcaactgtagcagtaattgatgttggtcggtaagttttctgtacttcacttaagcgagtctcaagcaaactctgcaactgagaatctagtgttaaatacaagttgtttccatttttagcaggcttataaacctgattactatttggaagctgatattcagatgcatctaccgaagaaatccggtaaccatctgtcccagtcaaagtcttattgaaataggcttcaattcccatagttccgactaagttttgtgcattagtctttttattccaaattggttgagccaatccaacagtatgtgatgcaaaaacaccattgggatacaatctagatggtgtttccaagaacttaattcctggtaatttcattgcttcaatctttttcttttgccgcaatgtcagtccactaccacctgtcccaaattgtacctgaaagaccttctttttgggggttaaatattggtaaattttttccgcagacaatggtaaaacctgtgccagcttttcagctgtcttggttttattcactacatactcaggtttattcttatagttgatcgaagtcttatctaaaatcgcataaaccgtatacaaatgcgaatcttccgcaattgttaatccatttcgatcatagatagtccctcgcgtggccttaattacctgattgcgcttataaagctgcttggtacgctgtgataaattttgaccattaactgtcttggatattccgatatataaaaatctagccgtaaatacaagaaaaaccaaagccacggccatttggagaaatctccccaccgtaaagcggtagccgtgggctttggatttttgtaattttaaattactgttttttttcattaacgaatcgtcctaatatttttgttaattagagttaatcctttttcacgtgcaattttatttaaacgtgaagtagaggtcaactccccaatctcttgacgtaaatcggtaatcttattctgttccttagcaactgtttgttgagttctagtcaattcatgttgagccgaagttgcagaaatactagaagaaactagaaagatcatcatgcccaacgtaatgacgcttccaataatcatcaaagctttttctatgccactataaggaactttacgcggatcaaggataattcgttgtcgtctttgcgaaccatttctactacttggttcatattcaatttttcttgctgagctatcagccataacattttcctctttataacttctctgcaacccgtagttttgcactgtgtgagcggttgttgttctctaactcagaagtagaggctacaattggtttgtgatttaccaaacgtagcgttggcttcataccgtccggtataaatggcattcctcttggcacctcaacttctgaatacttcttaaaaatccttttaacgatcttgtcttcatgagactgaaacgtaattacactgattcgaccacctggacgcaatatcttaattgcttcctctagcgaagcttgtaaaacatcaagttcgtgattaacagcgacccgcaaagcttgaaaactcttctttgccgggtgccctccagtccttcgtgcatacgcaggaatcgcatctttaatcacatcaactaattcaaaagttgttgcaattggcttttcccgtcgtctttctacgattctgtgagcaatttgacgagaaaacttttcatcgccatattgatacaaaatatctgccagttctttttgacttaaagtattaactaactgataagcatctaagtcctgactttgatccatcctcatatctaatcgcgcatcataacgatatgaaaaaccgcgatctgcttgatcaaattgaggggaagatacacctaggtcatagtaaatgccatctattccatctgagtaacccagttttaccaggtccttttccagattactaaagttgtcatgtaccaattctaaccttggctcactatccagttgtaataaattcgcaaagttcaacttcgccgattttatcgcatattcatcttggtcaaaacctacaagcgtaccggtgtcaattttgctgagcaaatatttagcatgtccaccaccgccaaaagttgcatctacataaagaccaccgttttttggtttcaaattgtcgatagtttcgtgtaagagtacactggtgtgtttgaatttcatattttttatagttcaatgtcgtccaaattttcagcaatatcatcatagtcttcgttagcttcttcttcaaaactagtccaacgttcttttgaccaaatttcaattcgatcagagacaccaatgatgacacattctttaatgagtttggcatgcattttcaacgttgttgtcagattaacgcgaccttgcttatcaaactcacattccatcgcaccagagtagaataaacgcataaatttacgtgtattcctcttagtcaacggaagttttgctaatttagcttcaatcttcgaccactcctccatcgagtagccaaaaatgcagccttccattcctcgcgtgaatatcatcttgtcgccaatctgatcgcgaagtttcgctggtataatcaggcgacccttgctatcaagattgtggtgatattcacccatgaacatggtctagcccccttccactaaataatttaccacaattccccactctctaccacattcataagaaaaaaatacagatttttaaatttcttttttattgtgatttttcaaaataaaaaaaagtcacaaaatattgaaattttgcgacttaagcatatacaagtaattttattttataacactagcatcaataaaagtccgatataccagaaaacagtacaggcagtcaaataatcccataattttctaactgtttttcctaaagaaatatttttatttctaatcgcatcgttcagcgacacaacaatcactaatacaaaatagcataaaaaaccataaggtaaaaaagaaggtttattcatatgtaaagtaattaatccacaagctgaaagaaagaaaaatggcataacatcgtaccctctaaactgtgctttagggaaaattttattgataaaaaaagcaactactaagccaataattggaattaggaaaatataaagcataagtattcctccattctttttattctaaactataattgatttgaaaaaaaccgttaataagcataaaatattgttcaaataggagggctgtttatggcacgaaaaaagaaaaagaaatcaggttttcaaaaattaactattgcaatggcttggatcatggcaattattactttagcagctgttattgctcaagctgctatctcacttcaaagtttttaaggattaaaaagacgcgaaagaaaaaatctcaatgtcattaagttaagacattgacaattaagggtgcttttttagagatcgaatcatttggattcgatctctttttttgtataaaataaaggcgaaaagaccagccttttcgcctatcttatatattatatattttaaaccttcaaaattattgccagaaagatggtgttaattatgaaagcccttcataagaatattctagaacgtcttgatcaaattatcaataatactggggatcatattcacgattttattaataatcctcatgcttttaccaggaaacgcactttagatgcagcgacagtccttaaaactacaattaacatgcaaggtcagaatttaaacagtgaactctttagagcttttggcgaagatgcaactaaaaagaacgataaagtagttagtacttctgcctatgttcaacgcaaaagccagctttctcctgcttgttttaaacatattctgactgtttttaatcaaaatctatttaatattcaactttttgatcatcactaccgtttgtttgccattgatggctctgactttaatcaaatctggaatccgaaatcgaataacattgtacaagcttcttctcataaaaagaaaccctattgtcaaattcacgttaatgccttatatgatctattgaataatacctaccaggattgtatttttcagcctaaatcagaaatggatgaacgcaaagcggctgttcaaatgcttaaagctttgaattgtggtccatatattgtaacaatggatcgtggctacactagtttcaatatgattgaaaactgcaatcgcctgcctaactgtcattacataatacgaactaaggctggacaaggcggagttaaagaaataacgacattgcctgatcaagaatgtgatcgtgagatttcctgcctggtaactacttctaactattactacatcacgcataaagccagtgagaatattcaccatgtccagcatcattatcgccaatatattaagtatcgctctaaaaatacccaggatctaagctgggattttggcgagttatgcacaataaaatttcgagcctgcaaatttagaattaatgatgccaaatcaggcaaagaagaatgggaagttgtgctaaccaatcttgatcgaaaaaattatccgctaaaaagaattaaagagctttatcatctgcgttggggtattgagacctccttcaagaaattgaagtattctttaggcagtgtacagttccattccaaacaagataaatttattgaaatggaaatttatgcccatatgattatgtttaatgcaatcagtcaaattgatgcacaggcctatattccgcaaaagcattgcaagtatcaatatgccatcaatttcaagcaatcatgcttgattattcagagcatgtatttggcttcttctttaacgcaagattttgaacggatccttattcagatcagctattataccattccaattagaccaggccgcaaggacaagagaaatattaagcccaaatcagctgtatattatttatatcgcgtagcttaaaaaagcagaatctgtgctatgccttatttgttgtacgaaaaaagcaccaatttaaccaattaaatgttaaatcagtgctttaaaagtctaatattaattgtcaatgtcttaacttaatgacattggaaaaaatcttccgcgtcttttttaaactcgataagcgtttaaatcaattaagaatggataatcctgagctaaattgccccaaatccaatacaagagaaaaaagaagacaactgcccaacctaaactgactaaaatgctcattaataatacgtgtgctgatgcagcactaatacccaccatattaaaaatgagccaactatacgcaacaaaaactgcagttcctaataaaacgacaattaatctagcccataacatttccggtaaaaaacgagctgttttttgacagatccagcaacttgcaggtaggaaaactgtataaacaccgataatgccataaaaatagatatcagcaacaattcctgcacctaatgctaaccaaatttcattatcattagtatcatcaaacagaccaatcaacattacactgattggcaaaatgacgcttgacgctgcaaagttgtcataagtcataaactgatgtaagtaaagtgcacatacaccgtctactaccaatgcaataaataagccaattgccaaaacccattttcgaaacgtagacattaattagccacctgtctttcaattacagttacaacagatggatcactaatatcacctgctggtttaattctaatctgatcagatagaccaaatgaatcacgagttgtcgtagtaactgtaccaattaacaagccttttggtgagttaccgcccataccactagtatatactctcgtgccggccttcagtttgcgaccatcaaccacctgtgtaaaggcaagataattattggaagtaactgtaataataccatgtactgtttttccattcgcagcatccgcttgaacagagaagcgattagccgactcatcagtagtagtaagtaattcaaccttggaagaagcagcatttgcttctacaattcgaccaataacaccgccatcgcacatgacagccatattctttttaattccagctgaacttcctttattaatcactaataaatctgaccatgtatcaggcgaccgagaaataacagaggcgttgaccatggtatagccacttaacgtatcttttaatttcaatgcagacttcaattgcctattttctttttcaagagctgaattgcgagccttcgtctggcctaaattagtaacttctcgctttagatgattgttttcttcttgcgtatttaaaatatcatgaacactatttaatccgcctgacacgagccctactggtacatcaacaattctagtacctaaagcaacgacatcgttacccaagctttgaatcagtaaaggtgtattgcgcctattgcgcaagctaacactcccacccaaaacggataaaataacaactactataataaatgctgataataactttttattttgcagaaattttttcattaagaattgatcctatagaaaaaccggcaacagccggcttttttattatttgcgacttctacgcattacttcaatattcttgagtgattcaccagtaccaattgctacacaatcaagtggatcttgagcaataaacacaggaaccttagttgcttcagaaataacttctggcaaattcttcaagagtgcaccaccaccggttaaaacaataccatgatcaataacatcggcagcaatttctggtgaagtttgttccaaagtctccttaatagctacgataatgtcttgaactacatcttgaatagccttggcaacatcaactgcttcaatatcaacagattttggtaaaccagttactaaatcacgaccacgaatattcattgattcaatttctttagccttttcaactgaagctgaaccaatttgaattttaatgtcttctgcagttctttcaccgattaataagttaaagtttgagtgaacatagttaacaatcgcattattaaacttatcaccggcttgacgaattgaagttgatgaaacgattccacctaatgaaattgtagcaacatcagtagtaccaccaccgatatcaacaaccattgaaccagtagggtccataactggaagaccagcaccgattgcagctgcaaatggttcttcaattacaaatgcttcacgagcacctgcaactctagctgcatcaattacggcacgcttttcaacttcagtaacacctgaaggaacacataccattactgaaggcttggaattaccaacagtcttttccataaaatatttaagcattgctgcagtagtatcgtaatcagcgattacaccgtccttcattggacgaatagctacaatgctgcctggtgttctaccaatcatttcttttgcttctgaaccaacggcgattacttcgcctgtttgtgtattctttgctactactgaaggttctctaagaacaatgcccttaccttccatataaacaagtgtattggctgtacctaaatcgataccaatattctttgtacctaatccaaacacaaaaatctctccttaactgttgcggtctctaaatcttgactaattatagcatactataactttaaaggcgcctttcacacaaattttaaagaactttaaaacaatttttctcacgcaaacttaaatattgaccttctcccacgataaaatggtctaagaaatcaattttcatcatttttgcagcttgacgtaaactttcagttaattccaagtcacttgcagatggcgttaatttaccactaggatgattatgagcaataaaaattccagagcagccataaataactgcccaccgaaaaatttcccgcggatgagcaattgatctattcaaagtcccttgaaatagtttcttctcagcaataatgtggttgctattgtcaatatacaatgcccacaattcttcctgcttgtgtcctatcagcttatcagctaaatacgtacctacttcaatgctagatgtcaaaattgtctttctcttaggtgaagcgcagcgcaaacgatctagtactgcctcagccgtaatagcaagttcatccgagcattctgaactggtaataaactttaatagatcattaaacgaatttaaccctgtgtttttcagaaaaacatttaagtcctgcaacgtatgaattcctttattttctagttgttcaaataattgtgtcaatagctctaaatctgttttgacaaagtaatgatttggttttctttttaacataaaatccccctcattacttattacgcaaaaaagagctaaatttttttcagaaattcaaaaaagttttgacaaatcatcgttgcattctgcttatctttaacagatggtgctttcaaatctggtaccatcacacattttaaccctgcattagcagctgcttgaacaccggttgatgaatcttcaaaaactaaaatattttctttaggtaaattcattttcttagctgcttctagataaatatctggtgccggcttagccttaatgtgacctctttgtacatcaagataactaagatgaaaatcaaaataatttctgattccagtcacccacatagcatgctgaactacattttcataattacttgaagcaatcgccatcttcaagccacgcttttcaaattcgtctaatgcttcttgaacaccaggttgcagctttaactttccctcatcagtccattgccacaccaagtcatcagttcgcttaataaaacgatcacggtctgcttcagttttaaaatatttatgataaaaatcctgcatctctttaactgtagcaccagttaacttgagataagcatcccgcggcgtgcccaaattctcttcttctgccgcctgaatattagcatcccaatacagcttctctgaattaactagcaaaccgtccatatcaaagataatgccttgaatatcatcatctagcccttgtacgcgcatcacgttttcctttccaatttaaaatagcactaaccaaataaaaggatccactaacaattaaaatatcattagctcccaagtgatctcgcagctgggtaaaagcagctcgataatctttttcataattatatcttttttgtacatcaattggaaaatcatcttttttagctactcgcggataagataaagttgtcagtaaaacttcatctttatcatcaaacaagctaaacacctgctcaagatccttatctttcatcatagtcactaaagcataaagcttgccatgcttttgctgggtcatacgatgaacgactgccagcaaattactcattgcctgaatattatgtgctccatctaaaatgattagcggattttctcgtaaaatttgatagcgccctggaataatcgtttgattaatcgctgtttcaacttcttcatttgataaaggcagtttcaacaaaaagaacgcctggcaggcaacggcaatatcataggcttcaacttgtggtcgtaaagcaaaaactagctttcttttgtgatcttgataaacaatttgattatcaagcaaaacactaaagtctcgtcctaattgataaactatcgcatgttcttcttcggctttacttttcaaaattggccaaacaacttctggcacgttacctaaaactactggtctttttgccttaataatgccgcttttctcacgtgcaatatcctgaattgtaggtccaataattttttcatgatcgagaccaattgtagtaataacacttacttctggcataattacattagtcttgtcatgttctccaccaattcctacctcgataacagcataatcacactttttttgagcaaaatagacgaaagccagtgcgacttcatattcaaaggttactaacgaaaaagttgagtcctgctgctgcaatttctcataagtaccctgcacaatattagctgttttaactaaatcctgatcactaatattttgattatttaactgtattctctcattaaattcatagacatacggtgagacaaaaaggccagtcttttgaccagccttttttagtaggtttgataaatagtatgaagttgaacctttaccattagtgcccgtaatgtgaatcgttttaactagatcttgaggattgcctaattccaacaataaccgcttaataaaagacaaattatttttaggatgtaaatgaggcaaagcatataagtaatcgattacttcttgagctttagtaaatttcaattatttactctctttcaaatcttgaattctttcacgaacaccggctaattgactttcgtagtcagccttcttttccttttccttgttgacaacagcttctggagcgtgaccaacaaagcctttgttagccagcttcttttcacaacgagcaacttcgtcttcaagacgcttttcttctttttccatcttttctagctcatcgtcaacattaacaagttcagttaatggaacaaaaatttgtgcgcctggaattacagcagtcttagctaattttggtgcttcaacttcactagctacagtcaattcctttggatgtaagaagttttcaacgtaatcagcattttcgtccaaaacgcgcttgttagcttcatcgtctaattgaatcatgatgtcgatttgacttgacattggtgcattaacttccatgcggatgttacgtactgctttaatagtttcaattaagaaggccatgtcttgatctgcttgcttgttttcaaattccttgtgagtagttggatattcagcaaccataactgacttaccttcatgtggcattgaaagccataatttttcagttacaaatggcataattgggtgaagcaaacgcaagatttggtcaagaatccaaattaagttttcttgctttcttgcctttaattcttcatcgtcaccattcaaagcaaccttagaaatttcaatataccagtcacagaagtcattccaaataaagttgtaagcttcacgaccagcttcaccgaattgatattcatcaaacaagcgagttacttcactaacagtatgattcaagcgatcgaaaatccaacgatctgataaatcaaatttagaagcatctggcatatgagctggtttagcatctgctggcaagttcatgattacaaaacgacttgcattccaaatcttgttaatgaagttccaagcagcagataatttcttaggatcataacgagtatcttgaccaggagcagtaccattaagcaagaaccaacgaagggcgtcggcaccgtatttatcaactacatccattgggtcaacaccgttaccaagtgatttactcatcttgcgaccttgttcatcacgcattaaaccgtgtaaaacaacatcattaaatggacgcttgccagtaaagtgcaaactttggaacatcattcttgatacccagaagaagataatatcgtaaccagttaccaaggcattagttgggaagtagcgcttaaagtcttccgcattagtatcaggccaacctaaagttgaaaatggccataatgcacttgagaaccaagtgtcaagtacgtctggatcttgttcccagttttcaatgtccttaggtgtttcttcacctacataagtttcaccagttttcttattgtaccaagctggaattcggtgcccccaccacaattgacgtgaaatacaccagtcgtgaacatcttccatccagtgatcaagagtttgttcaaatcgttctggaacaaagtttactttgccatcagtcttttgattttccaaaactttgtcagcaagtggcttcatcttaacaaaccattgcttagaaagacgtggttcaacttgaacgccagaacgttctgagtgacctactgagtgaacaattggttctatcttaatcaagtaaccttcttctttaagatccttaactaaggcttcacggcattcaaaacgatccataccagcatacttgccagcttcttcgttcatcgtaccatcatcgttcataacattgattctttcaagattatgacggttaccgacttggaagtcgttagggtcgtgagctggagtaatcttaactaaaccagttccgaattctggatcaacgtgttggtcttcgataattggaatgtgacgaccaacaagtggcaagatcaattctttgccaacaatatccttgtagcgcttatcaccaggtgctaccgcaacggcagtatcaccaaacatcgtttcaggacgagtagtagcaatttctacataacctgaaccatctgcaaatggatacttaatatggtaaaaggcacccttatcatctttgtgaataacttcgatatcacttaaagcggtttgaagtgctggatcccagttgatgatgtattcaccacgataaattaagccttcattgtaaagctgaacaaaaacctttttaacagctttagaaagacccttgtctaaagtaaatctctctcttgaataatcaagtgaaagccccatcttagcccattgacctttgatgattgatgcgtattcatctttccaatcccaaacctgtttaacaaaagcttcacgtcccatttggtgacggtctttgccttgtttacgcaattttgcttcgaccttagcttgggtagcaataccagcatggtccataccaggaaggtaaagagtatcatagccttgcatccgcttaaaacgaattaaagtatcttgaattgcagtatcccaagcgtgacccaagtgcaacttaccagttacatttggtggtggaataacaattgaatatgggtgagcttttttgttacctgatggcttaaataaatcttcatcaagccaggtttgatatctacctttttcaacctcgtttgggttgtatttaggtgctaaatctgtcataaaattcctccaataaaaaagtcctagacatattgtctaggacgatcagttaaaccgcggtaccacctacgttaagcatgtatcaaacatgcttctcttgaagacgataacggcgtataccggattaacctactttttattttcaattaatcagctaatcaagctactagtcaaccttcggcctctcagctgtctggcttttctctgttaataaagtcgacccctcttgattcttgctttggttatgattatagcatgaacttcactcagaaaaaagggttaggaattagtcgtaattaagttagccatatgtctttattcttttaataaatcagcaatacatttttccgatgaatgatattgcttatattgttttaacacgttgattaaatcatcatagtgactattccaaaaataataattttcatcataagatttcacactcttaagatcgttataatactgcttaacaaaatcactaggcttcactttacttttatagttatttgtatatcgctgatagtcttgatgataaagaatgtctagaatttcaatctcaggtctagtacgaagttctactacttcggatactttctttttatacacttctggaagattaaacttttcggttttggaatcaagtatcctataaattttaacctttctacttctaaaccctttattcaaaaattctttagcaaactttttagcatttcgtgctctaattacttcaccttcaagaagatcatcctcgttgaattttagtgcatcgtgttccaatagaacttccataattgctcgttcagtatgaccttctacaataatagcgattagatctgtagagttactcatccattttaaccgccttttctgtagccttctttaaagccatgtaggcatcataatctggagctgtcccacctaaataatctgattcaaaaacatcggctttatttagatcgcttcttacatcagcagttgaatatctttgaagctgaatcttgccttctctcttagtaatatattcttcatcagttctttcaattttatccaaaatttcagtatagtgcgtactaaataccaaagtagctctatttatgttgattttaggattagtaaaatactcaataaaagaatctacaatagcgtgattaaagtgattctccaactcatcaataaagatgatgccaccaacggaaagtgcattaattacctcgccataaagagttatccctttagctgtaccagaagacaagtattttgcaatcgttgtaaaatcattttctgcaatctctgtatctttccctttaaacttcagcttaaacaattgtttagtagcaccagagccctcaggcttgttttcaattttaagatattcaattgttggatctaaaaagtttaaaatttctccaggcacattgccagaaccatacatcaatgcattaaagtcagtaaagaacaaagtatcaaatggtatttgaggataatacttatttttcgaaataatcgctctaaaaatcgaatcatcagacgacaaaattgaagaagctaggtcgcctaattcttttctgtctaattctggttttatatttttgaaatcaaataattttttctttgaaagattaacagttaccttttttcgatataccgtttcagactcaatatgccagcttttacttaaagttttctttaacttgaaaactaaactatccttataaactacatgatcagttccataaaaataagttgtaacactaataggctcatttcctattagcacatccgttagcttagtttgatcaattgacttttccatcacaactgtttgaagaattcctatcaagagtttcatgatcgtagtctttccagtagcattagtccctactagagtgattaaattattcacccataaactgccgagcaaatgagttaatcgatcagaggtattagaagtaacccttgcatcactgaccagtgaaaattcaagatcatcctcaaatagcggatgattttgaatttctaattttaaaaagtataatttatttttattcataattattcacctaaaattgttttattcaggctaaattttatcatatttttgcattttatacataaaatctgtttaaaatataaataatcctcatcaagtagttactacttcatgaggattatctaaaatattctactttctaatcatcttaactgcttgaatcaaaatcgttggaatcagagccaagccagcaagccacattacttcttgcccagttaacggagtaactgcaaacaagctatgtaacgccggtacaaacaaaatcaaggctaacaaaattgttccgacagcaaatgctgctaaactgtaccagttatttttgaaaccgatcttgaagatactgtgttgtgaacgacaattgaagccatgtaaaagccgagcaaatgtcaatgttgagaacgccatcgtcgttgcaactgcaggactatcttttagtccgatcaaaaaggcagcaattacactaatcgaaatcaacaaaccttgaatagtaatttgactcacaaaggctttgtccaaaataccagccttaggatcacgtggcttacgtttcaaaatatctggatcacctggctccattccaattgctaaagctggaagcgaatcagttaccaagttaataaagagcaattgaaccgctacaaatggtactggtaagccagcgagtgaagcaaataaaacagtgataattgctgaaaggttacctgataacaagtagccaatagcgtttttaatattttcataaactgttctaccgttagcaacagctttgataattgtggcaaaattatcatcggccaaaatcatgctggcagcatctttagatacttcagtaccagtaatccccatcgcgacaccaacatcggccttcttcaaggctggtgcatcgttaacaccgtcaccgatcattgatacgatacgatcttttctctgccatgcattaacaattctgatcttgttttcaggcgatacacgagcataaaccgaaatcttctcaatgttttgatcaagttcttcatcgctcaaagcatctaattcaaggccagttaaagccatgtcaccttcattgaaaataccaattttcttagcaattgcaacggcagtcaccttatggtcaccagtaatcatcacagtcctaatcccggcttccttagcacgagcaactgcagctacactttcttcacgtggtggatccatttctgaaacaaggccaataaaagttaagccatcttctgcttcagtagaaagctcttcatcactttctttataagcaaaagccaaaacacgcaaaccattttctgaaaagtaattgttttgtgccaaaatttctttacgatcttcttcagtcattggacgaatttcatcgccgaaacgaatattgacacagcgtttcaagagcacatcaattgcacctttaacaaaaatagttggtacagtatgaatcaaatgcttagtactcatcagcttacgatctgagtcaaatggtacttcttccagacgcttagaatgttcgcgtaattcttgttctgataagcctaaaacaccattacctaagtcaattccgggcacttgacgatacatttccagcaaggctgactcagtcggatcaccaattgccttatcttcggccaaacttgcatcgttgttaagcactacatcataaagcaagtagcggtgaagttgattactcaaatccagctcatttggctttaaaactttaccaccaatatagatgtcctcaacagtcatcttattttgagttaacgtaccagtcttatctgaacaaattactgatacagaccctaaagattctacggctgccaagtttttaataatagcattttctttagccattttttgcgtacccattgcttgcacaatagttacgatagaactcaaagcttcaggaattgcagcaacagctaaagctactgcaaatagcagtgaatcaagcagcggttgaccacgccacatttgaataccaaagatcacagcacacaagattaaaatagcagtagccaatcgtgatgaaaactggtcaagtgatacttgcagcggagtgcgacgttccttagtttcattcatcaaggaagcaatcttaccaatttcagtctgcatccccgttgccgttaccacaaccgtagcacgcccataagttactaaggaactggagtaaaccatgttaacccgatcagctagcggcacttctttttcaaaatcagtgtccaacttgtcaacattagtcgattcaccagttaatgaactttcgttgacttgcagagaataattttctaaaattcgaccatctgcagtaactaagtcacctgcttctaacaaaagaatgtcgccaggtaccaagtccttggcctcaatctccattttttggccattacgcaaaactttagccgttggcgcagataatgactttagcgattctagcgacttttccgccttaacatgttgtaccgtacccaaaatcgcattcagaatcaatacaacaataattaccaacgtactttccagactgcccgtaaaagcagaaattattgccgcgataattaggatgatcaccattaagtctttaaattgttctaaaaagacctgaaaagtaattttcttctttccttcaactaaagcatttggaccaacttgagctaatttctcttgagcctctttagcgctcagcccctgctttaaatcggtatttaactctttagctatctcgtcttttttctgacgatagtattccatgtaaagccctccctaaacataagagtaatttaagcaaaaaaatagagactactggctaaaacactgtttagtcaatagtctcatcatttaaacttacagcggaaaataaatttcgttctgacgccgtaaatacaatttatgccgattactccctatttacttgtacataattaaaccatatcaagtaggtagttggcaagctattttaactttcttttaggaagttttctaattgttcatcggtaaaatcagaaccgtaattttgttcaaggagatgcatgatctcttgcttggtattaccagttcttttaagtgaagaaactaaaattttgacgcctcgtttaagtccctcttctttaccttcctcacgtgcgtcttgttctcgctccagtattttctcttcgtagtccatgatataatcactccattccgagcaataagataatcatttgtacttcttatctttcaataatccgttagcaatatcagccgaactaactggtacaccgactaaacgctcatttttccacaaatcaaaaaaatcagctggcatcatttgatcaaattcatcatctgaattcattaaatccttataaacacgtgacttctcaaataaatttagagcctgcttaggataaatgtttaatctcttagcaattaagtcgctaattgcttcagctagttgctgatgaaattgcttttcactaatttcgggaatcatctaaccaactccttatctatgaacgttaaagctttgagagctctttctgtcttgaaacaatactgctccgaataaacactcggttttaattttagcagagcctcatctaaatctagattaccatgtttccagcaattaacaacagaaaaaagtttaccatctgctgttgggccaatgacgatatcagaattatcttttatattattcattctattttgaatgacaaacttaatccaatcaatatctgcttggtaaactaatattttcaagtcgggttgatcagcatcgaatacatatctatttaatgtcggttgacctgaatatctagccttacgctttgcccatttttctgcttgtctacgattagcagtcacataaaagccattaccaaaatcagttgtaaaaacatttttatttatacgaggctgataaacagcctgattgcttccatgatacaaaatgactttggtattgcttttcatgaatcgtgatgtatgcgtatttttcatcgcgcacctctttcataaatagtaggacaaaattatcctccactatttattacgcaaaaaagcacgatttttttgtgagaaattaaaataaaaaaagaaaatgcctgagaattatatcccagacattcaccaatttacggctctttctcatttctcttccttcacaatataaattggtcgttctttaacttgtaaatagattttaccaatataacggccaataattccgatacacaaaagctgcaaaccgccaatcaataaaataattgaaattgtgctggcccagcccaaaatacttgaaccaggaactattagtttacgaacaattacaaaaataagaccaataattgacaaaatgaatgaagttatcccaatccaaacagctaagttaagcggtgcttgagaaaaatcagcaatcccgcccaacgcatatttgaataatttgtgagtcgtccaatcagtttcaccagctacgcgctcgacattgtggtactcaagatacttagtcttaaaaccaacccaagcaaaaatacctttagaaaagcggctgtattctttcattgataaaactgcgttaaccatctgcctggtcatcatgcgatagtcgcgtacgcctgaaacaatttccactttagaaatgcgattaatcaccttataaaattgattgctcaagaaagacttaaacttaccttcccctttacgatctactcgtctgcagccaactgcatcatagtcaccagtctgcaaaattttatacatttttggtaaaagtgaaggcggatcttgcaaatctacatccattaagacaatataatctcccgttgcagctgataggcccgcatagatagcggattccttaccaaagttacgagaaaaagaaatatagtgaacatgtttgtcctgctcatgcaattttttcaattcggtcagtgtgttatcattggagccatcatctacaaaccaatattcgggcgtcactttgggcattttagctaatactttttgcactgctggataaaaaagtggaattgtttcttgttcattaaaacaaggaaccacaattgataatttttccattagatttcttctttcttagcttttctaaaagtaactactttattaattacaaattgaattaaagttgctacaaaagttgctactattttaacgattaagtgcggataacccaatttagtaacgaaaataaatagggaaaccgtagtaaataccgtggtaatctgaccaacgataaaataagaaataaatcttaatatcatgcgatcatgaactttaaagttagtataagaattccataaaaagttattgatgatcccgcaggtagacgaaataatgttagctatttcaacattcatcttgaaatgcgtcaaaattgtataaattccaaaatcaacgactagccctaatacgccaattagaacatactttactaattgaacaaaatcttctgaatagattgctgttttgattttttccataattattcctaataaaaaatccagacaagaggtcctggatttcaacatatttaactaatatggtcttaattatatcattgtttttaagctctacgttttcattattaaagttaaaactttaataggaacaccttttgcattaattataatttttgtcattcaatctatctgtcttgttagtatcctcatacaaatgataggaactcttaatcttatgcctgccttgtggatcaaacatgcagagaaagataacatagcaacactttaaattttgatatgtgctgcatttcaaaatcatacagatttccatcaacatcctcaaccaaaatatcgagaataacagctttttgcttagggtgtttgggatcagcgacctttctctgcttctgcagataatgaatatctctaatctcaatctccggcaccagtccctgtaggacatgcttgcaaaaattcttgttagacataatctcaccaaagattacatcctctgtgaagccaaaccagggcttctttttcttgtgcgtattttccattgcgcacctctttcataaatagtaggacagaattatcttccactatttattacgcaaaaaagtgcaatttttttgtgagaaattgaagttttttaaagttttacccaactatatcttccaacttcaattccagatattctccccgctttaagttagcaggcaagcttaactttcccatcgaaattcgctctagctcaacgactttcatccctaccgcaccaaacatacgcttgatctggtgatatttaccttcacaaattttaatttcagttgtagacctatcgtgctcttcatcctgggataatatcttcaattctgctggctgcagtttggtcccatcgcctagtgtcattcctgaagcaaaagttttaacagttgcatcattagctacaccagcaatttcagcacgataaactttatcaacatgcttaccaggtgcaagcaattcatgattcaactgaccatcattcgtcaaaaggagcaagccagtagtatccttgtccaaacggccaactggcacgattccttgataacggtcctgcggtgcaagcaaggaaatcaccgttggctgattgcgatcttccgtcgctgacaaaacacctttaggtttattcaataagaaataatgatatttttgataagcaacagcatctccgttaacggtaacctgatcgctttctttaacttgctgctttggcgttttaacaatcacatcattaaccgcaacaattccttttttaattaattggtgtacttcttttcgtgagccaacattcatattggccaaatatttatctatgcgcattatgtctttctttcgttcttatgtgttgattaatattaattatataagaaagttaacccaatttcgaattgcgacactaatcaaaaacggtcgattttgttttcgaccgtttttacgcgcgttttgcgcgcgattatttgcttaaaatatattttgtagctctgccttcacccattcttctaatataaccttgtttttctagttgccgcaaaatcttcaaaactttcgtcctaccaaacttactcatttggctaatttgcttcgtagtatccgcaccttcatgaattatttgatatactttcttttcatcattagacagatcgtccgtaataaattttaaaactggcaatattatctttatcgaattatcaaaaatttcaaactgcggttgaaccaaactacttctataagaatcatttattcttcttacacctgtaccaaattgctcaattaatcctaacctaaagaaaacattagcaataattggattacgcaaaatggaaatctgacctgaaagatattcttctttgctaagtccttgtggcaatccacctggagatactacttcaattctgtcatcatacatagaaattttaatttgcgaattaatgttccaaactcgatgaactaaggcattggctattgcctcacgaaaagcttcttctggaatctgacttacaatatttcgcgttgctccctgtatttcttcatgttgataatattgacgatatttttgaattgcttgcttatactctttaagaatagattcatgctcataacttgctcgatcaagcataatattaatgctttcaccaaaccgaacaatatcaattccacgataattatttttgtctgccaaaagctcaccggcattagtgtaactagtatccttacgctctaaattaagcgtaatcaatatatcagatgttaaacttttaattcctatcttttcttttaatgcttcttctaaaatgttaaatgacaaattttggttcatcgcggttaaactatcataggttctattttcaccaattaagattaactgtgataattcagatcggtccacttcgatcgaagcactgtcattactcttataggcctttgatttgtataaatatggaggattaactccttgctttactgttaaagtaaccacattagttttaggatcaatttctaaattataatctggatttggtttgatcgaatcgttgattttattttcaacatttaaacaaaattcaactggatttttcacaccaacgattgatccatcatcctttattccaaatttaattttgccactgccataatttgcaaatgcactaaccgtttttagaaaagtattcgtcaatttctctttaaattctaaatttttggtttctctcatttaggtcaccgtttctaaactatttagttataattatactctttcacgcgcaaaaaaacggtcgaaaacgaaatcgaccgtttttacgcgcgttttgcgcgtgcctattatattaactttaaatcaatacataatactactagaagtttccatattaacaccatatctttctaaataattaaactgtatcatattaaatttcaaaaacaccagtgaaattaatcctctataacaagtcagcgtcttcttgagctttatcatccaagaatttttcatttggataaattggcgtaatctcaataccagccattgccctttcaatcaggccttcaacgtcaagacgagcttcatattcacgcgctttttccaactttggcttagtcttaggacgcggtggagcaaaaattgtacaacaatcttcaaaaggttgaattgataaatcaaaggtaccaatctcttcagctttggcaataatctccgttttatccattgttgcaactgggcgaataaccggagtagtagttacatcattgatagccaccattgattgcaaagtttgagaagcaacttgaccaactgactcaccattaaagatagccaagccgccacgttgtgcacgaatgcggtcagcaagctgcaacataaaacgacgttgcacagtcatcaaatagccttctggcagtttttccttgatcgtttcttgaatttcagcaaacggtacggcaataaaattaatcttaccagcgtagtttgccaaaataccagtcaattccttagccttagccaatgccttttcagtagtgtaaggtggactaaagaagtgaaccatttcaatatctactccgcgcttcaatgccagccatgaagcaactggggaatcaatcccaccactaagcatcatcacagccttaccagcagtaccaacgggcatcccgccaacaccatggagcaactgattagaaatataaacggcatcttgacgaacttcgattctcaagaccaaatcaggatgcttcatttcagccttcaagccatccatatgatcaaacaagtagtcaccaactagattattcaattgattagtgtcgtattcaaacttgtggtcactacgcttggtattaaccttaaaagtcattcctggcttaaaagtctcttgcatcaattccaaagaagtcttttcaatatcttcaagagtcttaggaatcttaattgctggtgagtaagtttgaattccaaataccttcttcagacgttggtcaacatccttgaatgatgcgccattcaggacaatgtgcatccgatcatgacgaggatgaaattcaatttgtgggaaatccttaagaactttttcaacgttacttgctaagcgattgatgaagtcctttctgttcttccccttagttgaaagctcgccatagcgaaccataacttctgtgtattccattaattttctcccaaatgattaattttagcaaaatgattatagatcttgtcaaagaccttaataaattcatccgcttcttgaagcgtattcgtctcatcaaaacttaaacgaattgcactagtagcaatcttatcatcaattcgcatagaaaccaaggtgctagcctcatctgccgtctttgatgcacaagcagaagtagttgaagtataaatatcttgatcttctagcgtatgaaccaaagtttcgccccgaattccctctaaagcaaagcaaagaatatgtggtgcaaagccatcgcttactggtgaaaaaatattaatccctggtttatcttttagataatcaacaattttagccttaatttctgcttcacgcttggccttttctggttcatcttctaaaagcaaacgaattgccttagccattcccgcaattgcaggcaagttctcagtacctgaacgcaagcccttttcttgaccaccaccatcgtgtaatggggtcagcatcttgccttcttttttatataaaatacctataccacgtggtgcatggaacttatgcgcagataagctcgagaggtctactcttggtgtaaaaaccttatcccaaatatttttgccaagtgcctgaacgttatcaacatggaactgaatcgttggataattttcaagcaaatcgctaatctcatcaattggttgaatggtgccaatttcgttattaacgcccatgattgaaaccaaagttgtatcagaatcaatcgcgtttcttaagtcattaacgttaactcggccttccttatcaactggcaatctggtaacgcgccaatccaaattctctaacgcgttaaaactattggctacagatgcatgttccacgctagaagtgataatatgcttaccaaattcacgcttttgaattgcagtccccttaattgcggcattatttgattctgttccaccagaagtgaagaaaatttcatgctgcttagtccccagcaaatcagcaatttgtttacgtgacgcctcaagcaattggtgtgcacgatcacccatcttatgcaaactcgaaggattgccccaaatattagtcgctactttattgtaagtatccaatacttgtggatctatcttcgttgttgcactattatcaaaataaatcactatcattaccccttcatttaaaaaacggtcaatcgcttgaccgtttcaagacttttcaattttagcttaaataatgaatcgcttcaattaattactcttctcttctgaataatatgcattttcaagtcgttgataactacctggctctaccttttcaattgctgtagcaattgtatcaagggcttccttatagttatattcattatatagctgcattgctgtcttttgtgcttgcgcaattgaatccttatctgcatatttatttgaatactgcatcgtcaattcaactaggttagcggaattaatgatgtcatctgcttcacgtttaagccgctccacatcatcagaaatttgaattaattcagctgagatcttttccatattaatccggacctgacttaattcgttgctgacatgaccaatctcgttgactaccaaagtgtacatttggacaaagctatcaggattgccaggcaaatttcgtctttcaagtcgacgataaactaatgaaacttcttgcttaaagcgcttgattgaatcattagctacattttcagaatcataaagtccatcaacgtcagttgacatcttagcctgctctgcatcaatttcacgcaggcgatctagcatctggagccatgaatcttgaatagcagagtaaacacccttaccatctgcgatattctgtgtatcaatagtgtactgatggtacatttcattgacttctttttctaagtctttactcttttccaattcgccatgagtcaattcatagctctcatcaatatgccgcaacttttctaccagtttctttgacgcggtttgctgatgtgagatcaaagtcagcattttactttgatttttttcaacaaatggtcttgccttgtattccttagctaaaacatcatacaggtcgtcaatttcgccagagatctttttattttccttggctaattcatccaccttagtctcagctagcaatttgcgcgcaccatcaatttcatcatgaatttccttgattctgcccaaaacatctacgctagtaaggtaatatttttctgaaatcatttttttataagcatcagacaattccttaagctgatcttggaacactacttcaagctgatgataaccctcttttagcggttttaagcgtttttgtaagttacccaaagacatccgaatcttggacaaaactcgcttagcttcaacatgatcaccttgtgaagaaagattttttgcttcttcaaagtcactctccattgatgctagttgatcttcaacctgatcaatcgcagcaccatattcaaaggaattggctaagatatcttttcttaattcacgataaactttaatcaaagcatcatattgaatttgattttccttatttgattcaagtagttccgtgaaaactgccttggtgttacgagcatcttcgagcgttggcttgataatctcctgtgcttgtttaatattctttcttgctttaaacaagcgataagttgcattttcattagcagcttcttcaactagcttatgcactcgcggtaattttttcttagctgcttcagtgtagctcttgcgccaagtatttaatgtagttaaactttcgccggccaaatccattttatccagtcgcgtaatatcatcttctagatgcatcttctcaatttcagtcactgctgcatcaatcgcttcaatttcttttagttgtttacgattgatcattagcattgctgcaactacgacaatgattaggatcaccacggcaataattataatagcttgaattgatgacatagtttatcctccaaaactatcataattataacaaaacctgaccctaataggtgcaaaaagctgttctattttcttgatttattattctgaactctatataatactattcgtgtaaaatatttgcagcaataagtgacaagaacgtcaacatcttgaaacgctttagtgaacgagtaacccgcgctgcattgggcgaaaatgtaaatccaagatgcacgaatgttgaacttatgcttaatattttactccaaaaattattgtttaaattttatggaggattttttatgtcaagatatacaggtccaagttggaaacgttcaagaagattgggtatttccctttcaggtactggtaaggaaatttctcgtcgtaactacgctccaggtcaacacggtcctaacaaccgcggtcgtttgtcagaatacggtcaacaattgcacgaaaagcaaaagttacgttggatgtacggcttaaacgaacgtcaatttagaactttgttcacccgcgctggtaagattcgtgaaggtcaacacggcgttaacttcatgattttacttgaacgtcgtttggacagtcttgtttaccgtcttggtttagctactactagagaacaagctagacaattggtaaaccacggtcacattactgttgatggcaagcgtgttgacattccttcatacgaagtcaaggttggccaaactattggcttgaaggaaaagtcaaagaacttacaacaagttaaggatgccttagaagcagttactgctcgtccatcatttgtttcatttgatgaaaacaaaatggaaggtactcttgtacgtttaccagaacgtgacgaaatggaaccagaaattgatgaagccttagttgttgaatggtacaacaagttactttaatttttacattttattttgtcgaaagtctttctcaatcgagaaaggcttttttctttgctacaataagtacataaaaagaaaggatgattagatgactgaagatttaaataaacgtgttgaacaagcagctcaaggtattactccacaaactaagcctgatgaacgccgcagatttttaggttcattacgtgagcgctgcttaatccgtatggacaatactgaagttaaaaatcctgaattaactgccctatttcttaaacatatcactgactttaagggctatactattttgatcaatggcaatatcactgatgatggcttcttgggagacattgaagccagttgcagcaaatatgatattcccttcactttagttaacaatgaaaccgcaaaaacaggaccacatgatacggcagtactagttgtagcgaaaaacgctatcaatcgaccacgaattgagctaaagcaagtttatccacctgagtttcctaaagaagaattagccgcacctaaaacaaaagaaagtttttggcataaactttttcacggagataagtaaatgaaaccattagcatatcgtatgcgaccaactaatttagacgaagttgttggtcaaaggcatctgattggtccaggcaaaattattcgccgaatggtggaagctagacttctgtcttcaatgatcctttacggccctcctggcatcggtaagacaagtattgctagtgctattgcaggctcaactaaatatgcctttagaaagctcaatgcagctactgacggcaaaaagcaattgcaacaagtagccgaagaaggcaaaatgagtgggacagttgtcttattgctggacgaaattcatcgtttggacaaaactaagcaggacttcttactgcctttgctagaatcgggacaaatcattttaattggggcaactactgagaacccttatatttcgatctcccctgctattcgttcacgttgccaaatttttgaattaaagcctctttctacagatgatgcttctcatgcaatcaatcgcgcattgaacgataaagaaaaaggtctaggcaaatataatgttgaattaacagatgatgcgcgtgctcttttgattgaaaaaggcaacggtgatttgcggtctactttgaatagtttagaattagctgttctttcaactaagcaagaattgcaagataaacaccaagatgatcaaaaaattatcatcactcaaaaagaaatggctgattcaattcaaatgaaggtgcaaaactttgatgcttctggtgatggacattacgatctagtctcagcatttcaaaaatcaattcgtggctctgatacagatgcagcgctgcactatcttgcccgattaattgaatctggtgacttagtctctatctgtcgaagactagcagtaattgcctacgaagatattggactagccgatccagacgcagctgaacacgctatagtagccatccaagctgcacaaatggttggcttgcctgaagcacgaattccactggctaatgcggttattgagttagctctttctgccaaaagcaatagtgccatttcagcaattgatgctgcactagctgatattcgaaccaaaaaagttgactcaattcccgccaacctaaaagatgctcattactctggtgccaaaaagcttggacatggcgtgaactacctttatcctcatgattatcaaaatgattgggtagcacaacaatacttgcctaataacctgcttcatgccagctactttgcacctaaaggcaattctaaaatcgaagctagatataaggcaacctatcaaaaattaaaacaaatgcagtctgataacttgcgcaataatcactaatctcgcgcattcaatatggttgacaagcacctgtaatatgcgtattataataagtgatctgagttgatcgacaagcttaaatgtataaagttgaccgatcaaactataagacgtgggagttggcaaataactaccgaatcggaatactgccttgttgcaggatccatattcgctgcgatgccagctaaaattttgaacattgcgggttcaacaagcgtcattatgctatgtttagtcaactcggatttctttagaatattaaaaaaggcggtctcaattgaccgtctttttctatagtggagactgttaaatggcaataaagattgtaatgattatttttatccttctcctactgttaacctcgtggtacatgtggcacagaaggaacggacattttttaatttatgacattggtggcgatccacgcttgagcaatattcttaagtggacttcagtcgcccttttagctgaaagtattttagggattattttgctattcatgggtaataaatatttaaatctaatcaccttattcttagcttcattaactattttggcttttggtttatcaattactcaaaataaagaataataattcactaatgacaagcaaaattttggtaaaatagaatatagaaagaggtgcttatatatgctttcacaatacaagaatattcaagttgcagttgatggttcaaaagaagctgacttggccttcagcaaggctgtagccatcgccaagcgtaaccatgcaacactagaaatcttacacgtaattgatactcgttctttccaaaatgtttcaagttttgattcagcaatggtagaacaagtttctaaagatgctgaaaagagaatgaaggattaccaagctcgtgccactaaggctggcgctgaagatgttcactactctattgaatttggttcacctaagacaatcattggacatgacttccctaagaagcacaatattgatttaatcgttgtgggtgctactggtttgaacgctgttgaacgtctgctcatcggtagtgttaccgaatacgtaaccagaacttctaaatgtgacgtcttggtatgtcgtactgaagaagttaaggatgctttgcaaggctaattatttagctttaataaccgataaaaaaatacctccaaaattcagatttgaatttttggaggatttttttaatgttatttctaaaaatcgccagccgtactgaacatgtaatcacgattatggaacttcatcgacaagattaatccaatcccaatcatgtttcccatcagagctgaaccaccctgagaaacaaatggcaatggaatacctgtcaatggcaataaatcaatattcatcccaatattttcaaatacgtggaacaagatcatcatgataacaccagttgcaatgtatgaataaaagacatttctggtatcgaacgagatttttaccatttgaataatcaggtataaataaatcaaaatcaatgctacacagccgacaaaaccaaagttttcaccaattaccgagaaaaccatgtctgatccacgaactggaacataaacgctagctttgccaaaaccattaccaaatagttgaccagaaccaatggctttcatactttgccataactgataagctcctgatgaagtatcaccagatggatcgagccaagacttaattcgttcaaattgatatgcttgaaagaaatgactcaacaatgattgcccagccgacgtagttactaatacaataaccccaatagctgctaaaatcaaaataccatataacggtacaataattttccaagaaatccctgatactaaaaccacgccaccaacgatggcaataaatactaacatagtaccaaagtcattctgtaactttagtaaaattgctaccggtgccagccaagcaataattttgcctaataacaaccaatcggtcttaatcgtgtgaccatatttatcattatgctctttgaccactcgagccaacatcaagataaaagctggcttcataatttctgaaggctgaaaagtaatcggccctagtttgaaccaacttttcgcacctgtatctgcagctacgcttctgttatataagaatagcaccgcaatcagcaaaaatattccgattccaaagaaaattggcgcaatcttaaacaactgttctgcatcaaactgcatcacaaccataataattgcaattgaaatcaagtaccataatgcctgcataactactgccctaacaggtgaaccaatatgactaggatcacctaatgcagcaacatagatacaatacaagctaattaaagccaagagtagcactggtataataatattccaggctaatcgatcgaatagacttgtttcattttcaacttttgccattaaataatcactacttatattttatttttcatgtaaggtaaagtatgaaagtaagtcattaatgctgctttcaagactgttagcaaacaaaatattgcttgtcttagaagtagtagcacgataacgcccctctaccttttcaattaaaccaatggactttctattaggaataacaacttcccacgttggcaaattctttcccttaagttcattaacttcaatatcaatattctctaattttttagacataaatcctcctacttgctatccggatgaaattttgaagcaataattggatcttcatatctctccggatgtggatttcgaaaaatagtaaaattatcaggaactggatccactccacccttgataaatgggttacaccttagtatacgacaaattcccataatcagccccaaaataggaccatgttttttcaatgcatcaatcatgtaattggagcatgttggataataccgacaacttggtggtagtaaaggtgaaatcactgtctgataaatacgtacaataaaaatcaaaatcttacgcaagtaatctcctcacttagtgtcgttgatgcttttcaatatttttaagcaaagtacctgttcctaaagcaactgcttctaatggatgatcagcaattaaaactggaacttgcaaataataagaaatcaacttatcaatattctttaatagggctccaccacctgttagcatgattccgcgatcaataatatctgctgaaagctctggtggagttgtttccaatacttctttagctgctgcaatgattgacatcaagcctggttctaaagccttttgaatctctggtgcagtaactgtagtctgcttaggcaaaccatcaactacgtcacgaccacgaacagtaatttgttcatcttggtctggttcaaaggcgctaccaatttcaatcttaatttgttcagcagttctagaaccgattaacaaattatgcttactcttaatgtaactgatgacagcctggttcatccgatcgccagcataacgtaatgattgagaagttacaatttcacccattgataaaactgcaacgtcagtggtacccccaccgatatcaatcaccatattaccttgcggtttaaaaatatccaagcctgcaccaacagccgcaactttaggttcaaagtctaaataaaccttgccgccaccagacttttcagctgcctgaataattgctttttgttcaattgaagtaactccagtaggagcacaaatcaaaatatttggcttggacataaagccttttacatttaatttttcaataaagtaagacagcattgcttcggtaatgtcaaaatcagcaattaccccattcttcaaggggcgaattactcgaatattacctggagttcttcctaccatctcatatgcctctgaaccaactgcaactaccttgtttgtatcggtatttacagctacaacagaaggttcatttaatacgatacctttaccagagacattgatcagtacgtttgctgtccccaaatcaattcctatatctcgtgccacgataaccctccataattattcaccgtccattttaccataaataatcatgactttcctttactgtccttgttttaacacaatctttaaaacaaattactcaattgcattgaagtatcgataaaagtaatgacaaaattgccaactaaaaagcctaagccaattgcaataaataaatataataattgcgtttcaaaaacatggcctttacgaataattttatctagttgaattgctttaactgcttgaaaagataagccaatcgcaatcaaatatataatgatactaataatgacatgaacgcctaattgaaacatatattttcctcaattttgacaaaaaaagacggatgcagcattttgtgcattcgtctcttccttcttctagtgacctttagtgttgtacacgctaattctgttcattgctcgtcttaaagcaacttcagcacgtgccatagtttgttcgtcatgtttttcccgtgcttccttcaaacgttgctcagcgcgttgcttcgctgcctcagcacgagaaacatcaatgtttcttgcgcgttcagcactatctgcaataatcgtagcaacattattcgaaaactcaatatagccacccgaaatcgcaatatgatcaactactgaatccatttcacggcttcgcttaatcttaacctcactaataactagtggagttaaaagtggtacgtggttatacatgattgaacgttcaccatcaacggcacgtacatcaacgatacttccacgatgtgaataaatcattccattaggagttacaacatctactttaaaaagcttctctggatctgccatttgacatcaccctacttttctagtaaagctttagcttctggatcacttggagttacacccatttcttgtgcttttttcaaaacatcttcaattgggccgacaccacgaaaggcatcttctggtaagtcatcaagatgaccatccaaaataagcttaaagcccttaatgctttccttaattggaacatatgaacctggtacaccagtaaattgttctgcaacaaagaagttttgtgacaagaagaattggaccttacgtgcacgtgcaacgatcaatttttcttcatcagacaattcatccatacctaaaacagaaataatatcctgtaattcatggtaacgttgtaaaacatgttgtactcgagtagctacttcatagtgttcttcaccaacaacttcagggtcaagggcacttgatgaagattcaagtgggtcaacagctggataaataccttgttctactaagctacgttccaagttagtagtagcatccaagtgtgcgaatgtggttgatggagctgggtcagtatagtcatcggcaggaacataaacggcttgaattgaagtaattgaacccttcttagtagaagtaattctttcctgcaattgtcccatttctgttgctaaagttggctgataaccaacggcacttggcatacgaccaagcaaagctgaaacttctgaaccagcctgagtaaaccggaagatattgtcgataaagagcaacacgtcttgaccctcaacatctctaaagtattcagcaagtgtcaaaccagttaacgcaacacgcattctggcaccaggcggctcgttcatctgaccaaataccatggccgttttacttaaaacgcctgaagctttcatttcgaagtaaaggtcgttaccttcacgagttctttcaccaacaccagtaaatacggaaataccaccatgttcttgagcaatgttgtgaattaattcctgaatgatagtagtcttaccaacaccggcaccaccgaacaaaccaactttaccaccacgtacatatggctcaagcaagtcgataaccttgataccagtttcaagaatttcacgactagtagtcaagtctgcgtacttaggtgcttccttgtggataccttcacgagggtgatcttttgaaaattctggaccaccgtcaattggttgacccaaaacgttaaacacgcgtcctaaagtatcttcaccaactggaacggaaattggaccgccagtatcttcgactttcataccacgacgaagaccatcggtagattccatggcgatcgttcttaagacaccatcaccaagctcaagtgtaacttcaaggacaatgctttcatcctctgacttaattacacgcaaggcattgttaatatcaggtaaattcttatcaattgggaatttaacatcgacaactgggccgattacttgaacgatttcaccttcactcaaaacatctacctccttttctttattactctaaggcatttgcaccactgataatttcagtaatttcagtagtaatttgtgcctgtctagcacgatttaattttgtagttaagtttgataccagatcattagcattatcagtcgcactctgcatggctgtcattgaactagcatgttcggcagtcttagcatccaaaatagcaccgtaaatagtagaacgtgcatattgtggtaacaacttcattaacacttgatttggatctggttcaatatcgtattctaattctttatgtgcttcagcttctttgacaccaatatctaaatcgacgattggtaacattttttcaacacgaaaagcagatgataatgagttaacgtggtgagtataacatacgtaaagctggtcatagacaccattcaaaaacatcttaattgcggttgaaacaattggtaatgcttcatcaaaagttggtacatctgaaacaccattcttttcataaacaacgttaatattgttctttttaaagaattgtgccgcaaccgaacctacagcaagaactttgatatcgtgtccttgagcacgttcgtcctcaaagatactcatcatattcttaatgacattgctgttataagaacctacaagaccacggtcacctgaaattaccaagaaacctgttgtcttgatattcttacgtggctgaatcatatctgctgtaatccccaaaccaaagacatcagtataatcaatttgagcaacattgttcttatcaattgagacgtctttttcacgtagattatcaactacttctgagctaattaaacgagaaatagttctacgaatatggtcgttataaacggtataacctttatcacgattttcagtttggttcaactttgaagcagagaccattctcatagcttctgtaatcttaccagtttgttttactgaagcaatttttttctttaactcaagtaaagatgcaggcatattctacctcctatttctcacttggtgtaaagctctcactgaattcttcaattgctgctgacaatttcttatcatctggcaattgaccagtttcacgaattgtcttgagcaaatcagcatgactgctgtcaaagttatcaaataattcgttttggaaacgagcaatatcttcaactggaacagcgtcaagatatccgtgagtcaaagcataaagaatcacaacttgcttttcaacaggaattggatcatgaagtggttgtttcaatacttcaacggttctttgacctctattcaacttagcttgagtagcttgatcaagatcactaccaaattgagcgaaactttcaagttcacggtaagctgcaaggtcagtacgcaaagtaccagcaaccttcttcattgccttgatctgggcgttaccaccaacacgagaaactgagttaccagcatcaatggctggacgagtaccagcaaagaacaaatcgctttgcaagaaaatctgtccatcagtaattgaaattacgttggttggaatatatgcagaaatatccccagcttcagtttgaataattggcaaagctgttaatgaaccgccgccaagtttgtcattcaacttagcactacgttcaagcaaacgtgagtgtaagtagaagacatcacctggataagcttcacgaccaggcggacgacggagaagcaaggaaagttcacggtaagcgacggcttgtttggataggtcgtcaaatacgattaatacatccctgccattgtacataaattcctcacccatagcagtaccagcatatggtgcaatataaagcattggtgctggctcacttgggcccgcttcaacaacaatggtataatccattgcgccaaaacgctttaaagtttctacttgagttctaacggttgattccttttgaccaacagcaacgtaaatacaaattacgtcttgccccttttggttaaggatagtgtcgatggccaaactagttttaccagtcttacggtcaccgataatcaattcacgctgaccacgaccgattggaactaaggcatcgatagccttaataccagtttgaagtggttgatcaactgattgtcgatccataacccccggagccttggcttcaattggacgactcttgtcagtcttaatttcacccaaaccgtccactggttgacccaatgggttaactactctaccgattaaggcgtcaccaacaggaacttccatgattcgtccagttctttgaacacggtcaccttcacgaatattgtcaaattgacccaaaataatgatacctacatcatttgattcaaggttttgtgcaataccgtatgagccgttatcaaacttcaataactcaccagacaaaacatcgttaagtccgtgagcacgggcgataccatcaccaacataagttacaacaccaacttcgctgatgtcaagcttatcgtcgtaatgttcaagttgttgcttgatcaaggaactaatttcttccgctttaatgctcaatggtttcacctcttttaatttttatcaattatctgcgcacggatcttcttcagtttattcttaactgatccatcaatcacgcgatcttctacttgaagaaccacgccgcctaaaatacttggatcaactttattctctagacgcaccacgtttaggttatatttcttagcaaaactttcacctaaacgtttgagttgatcatcatctagcttaacagccgtagttgcaacgccagatgcgaccttcttttcattatcataaagtaagacaaagcgatcaataatatcgatcaaatcagcaaaacgatcatatttaagtaacaaattcaaaaagttttgaacctcatctaaaaaatctttttcaattgcagtcaaaagatcctttttatctttattacttaaaataggatcgctcaagacactaatgatttgtggattggcttcagcagccttttttaattccaccatttcattataaacagtgtctaatgcatcattgtcttgcgcataaccaaatagtgcggcaccgtagcgtgctgcaatttcttctctacttaaagccattaatcatccaaccccttaataaattggtcgactaaatctttttggtctttagcagataaattcttagcaattactttttcagcgattgctacagaaatatcagcaacttgatcgcgtgcagaattcaaagcgtctgcttttgcctgatcggcatcttcattagcctttttgcgaattgctgcagcatcttcgtttgcatttgctacgatttctttacttgtgttttgcgcgttactcttagcgtcagagagaatttgtgttgcttcttgtcttgagttcttcaaggcagcttcacgctcattagcaagcgtttcagctttctttcgttcactagcagctgaatccaagtcatcaataactttttgccgccgcttttccatcatatctgatactggtccccaagcaaagtgcttaataagaagcatcaagatggcaaaacagatcaaataccagatagcattacctaagtaaatatgtgaggctgcaaataatgtttgaatagtcatttactgcccttctctctttaatactattcctttaaacagaaaattatctctttttattaaaggaacaaaatcaagaaggcaacaacgatagccaaaataggaacggcttcgatcaaaccaacaccaataaacattgttgctctcaagttacctgcactttcaggttgacgagccataccttcaagagtctttgaaataactttaccgttacccaatgatgcagccaaagctgctaaaccagctgcaatggatgcagcaagatatttaaaagcttctgacataaatttatacctccaaaaatttattctgtagtaaccttcttaccaatgtaaaccattgataaagttacaaaaacatatgcctggatagagccaatgaagacagagaaaccttgccaaatcatggctaatggagctgccaaaactaacgtaaatggtccaccagcatgtgctagatcattaccaattaaagttagcaaaacttcaccagcataaatattcccatatagacgtaatgataaggttaaaaagttggtaaactcttcaattaaattaattggaagcataaaaccaactggttgcgtatagctcttcaaatatccgccaacaccaaatcgttgtacgccgaatgtgaacgatagaagcaaggtcatcattgcaaacgacattgtcgctactggatcagcagttggtgatttaataaacatccaatcatcaactttgacttccatgaacatccctaattggttcataaaccaaataaacaggaataaaacaaatgcatatagtgataggtgattttgagcatccttgtcgctaacattatctttaacaatgccgttagtgaaatcaagtaaatactcgaacacattttgtctcttattgggtttcatttcaacttttcttgaaagccaaatgcagataaataaaactgctaaagccattagcgttgaaccgataataccagaaagttcaaaattcaagcccatgaatttaaaaacaaatgatttctccattacttcgtgacctcccttctcgtgctgaataaaactcgaacacgtaaatcatcttaacaccaaaaaaggtctttgtgtaaaatgaaagcgcattagagaaaatatttttctaaaaaggacgattacttagtaccaaatagtctgtcaccagcatcacccaaacctgggaaaatataaccattatccatcaatttgtcatcttcagcagctgcataaatgtcaacgtcaggatttgcttcttgaactgccttaataccttctggagcagctaccaaaacagcaagcttaatttccttaacaccacgcttcttcaatgcagcaatggcatcattagctgagccaccagttgcaagcattggatcaacgactaaacattcacgttcagcaatatcctttggagccttgaagaaatattcatgtggcttcaaagtcttttcgtcacggtacatcccgataacggcaatcttagctgaaggaaccatttcaaggacaccattaagcatccccataccggcacgtaaaattggcacaattgtcaacttcttaccagcaatttccttttggacagtcttacccattggtgtttcaatttcaacatcttcaagtggcaaatctctagtgatttcataggtcattaacccaccaatttcaccaacaatgcgacggaattcatttgaccccgtatccttgcgacgaataatagtcaacttgtgttgaatcaatgggtgatccaaaactacgaactttcccatatatgcctcctataaaaaataatatgatcattaaatattttaatcaaaaacgcaaagggtttaaagccctttgcgttttattttttatttattgaaatgatgtccacctgcagctttattcaatcgattcatgtaagctaaactttcttcaccttcatgaaatccttgtacataaatagtttcgatatcatcttgatcatcgaaatagcgcaagccaccaaataagttatggtcggcatcaactaaattgttgcccagatcaaatttatttgcttgaggtaaattaattttagctaagactggcgctaaagctgctacaccaattttttcattaaaatcaatttttgcaaaatcagcaggatcatcaaccacgactaccggctcacttggagcataatgacggtatttcattcctggtgccttaggtatatctttgtctgacactttgcccgtgttaattaaaactttttcacctaaaacttcgcttaactcttctggagtaatttcaccaggacgaagaacgattggtgtttctaccgataagtcgataattgtcgattctaatcccacacgagtagggccatcatcaataattccggcaatcttcccttttaaatcatggtaaacgtgctctgcagtagtaggactaggcttagttgaggtattagccgatggtcctacaattggataacccaatttagcaattaaatcatgagtcaattgatcatcaggacaacgaaatgctacagtatcaagtcccccagtaactgcatctggcagagttcctggtttaacaaacaatagcaatgtcaaaggacctggccagaaatgtttaattaatttcttagctctttctggaacttctttagcatacttagccatcatttcttcgtcagaaacagtaacgatcaatgggttatcacttggacgtcccttagcagcataaacgcccttcacagacttttctttggttgcaattgcacctagaccatagactgtctcagttggaaaagcaaccaattcacccttagctaacaacttaactgcatcattgatttgatcttttttaaaaatcttcgtttccatcattcttatttttgccaccttccatgaaccatgcgtggcttgccggccatatcttttctaaattcgatttcaaaatcaggcaattctttagcaaacaattccttcagttgttcttcttcgctaaaaccaaattctaagaaaaattctccatggctattcaaatgctcacgcacttgcttagcaaattttttatagaagtctagaccatctttgccagcaaaaagagcttctttaggttcattttgcaagacattttcatccattacattcttttcgcttgtcttaatatacggcggattagagatgatcttatcaaattcttctaagcccaacagcacgttggctttacgagtagttacatcaagatcataagttaaaaagttttcctcacttgttcttaaggcagtatccgttacatcactagcatataaagttaaatctgtaatgccttttttctgtgcttctttagctaaagccacggtaatacagccagaaccggtacccaagtcaaggacttgatcacctgatttaagtgtctgcaatgcccattcaaccaattcttcagtttcaaaacgaggaatcaagacaccgcgttgcaccataattttatagcccaaaaaccaagcataacccaaaatatactgtggagatatgcccttagccaatttttcgatatctttattggcctgcttaatctggtcagcagttaagtccatttcttgcttcagttcaaattcacttggtgtcaagcctaagcgctctgctagaacataatcaacatcctcaggacgcgcattttcagcactctcacccgctttaatacgcatctgctttaaagtcattttaggcattttgatcagccaactcctctaattgcttagtttggttgtaaagaattaatgcatcaataatttcatcaagttcaccgttcatcacacgatcaagcttgttaatggttaagccgatgcggtgatctgttacacgattttgtggatagttatatgttctaattctttcggaacgatcaccagtaccaactgcattctttctcttagcatcgtactgagcttgattttgactttcataatagtcataaacacgtgatttcaaaatttgcattgccttttcacggttctgttgttgactacgttgatcctgcattgcaactacaatcccggttggcaagtgagtcattctaacggcactagaggtcttgttaatgtgctgaccaccggcaccacttgaacggtaaacatcaacacgaatatccttaggatcaatatcaatgtctacttgctcatattcaggcataacagcaacagtggcagttgaagtatgaacacgtccttgagattcagttactggaatccgttgaacacggtgtgcaccattttcatactttaatttcgaataaaccttgtcaccagtaatcatgattgccacacgtttatagccgccaacctcagtaggttctgaatcaatcattgaaaccttccagttttgacgttcagcatatttttcatacattctaagcaaatcgccagcaaacaaagaagcttcgtcaccaccggcagcaccacggatttccatgataatatctttatcatcgttaggatccttaggcaacatcaaaatcttgatttgatcttcaagctcgggaatttctttctcaatttcagaattttcttccttagccatttcaattaaatcaggatcagtttcactggagataatttctttattatcttcaatctcttttttgtcctctttgtacttcttatatttttgtactacttcacgcaaatcggcttcttccttagaaatctccatgtagcgcttagtatcattaataacttcaggatcggccatcatttcctgaagttcttcatagtgagctactagaccctctaattgagccataactttatccataaactaaaaatcctctctatctttcaacacctgggtgaaagtaatgatagcgacaaacaggataataactttcatcgccaccaatttgtacttgttcaccctcataaacaggcttgccattgttaattcttaaattcattgttgccttgtgtccacaataatgacaaatggtcttcatctcttctattttatcagcaaaaatcaataaattttcactaccttcaaatagatgattttgaaaatcgttttttaagccaaaggtcattactggaatattgaacacatccacaattttagcgcattctaagacatgatgtctcttcaaaaattgtgcctcatcaattaacacacaagctagtttaccatcaccatcagcaacatctgctttgttcatctttttaatataatcaaatagattcatatcagcagtaattggaattgcttctcggtgaagtccaattctagaagcaatcgttcctacaccgctacgattatccaagccactggtcattagggcaatcttgcgcccctgtgcttcataattgtgagctactttcaagatctcaattgttttgccactgctcattgcaccataacgaaaaaataattgcgccatgctggccctcccttttaacaaaaagtcttcgccttaatagtatagaggaaaaaataaatttgtgtaggtattaaacctcgttttcatcctcgctctatgctaaacttagacatagttttaaagtgagggatgtacatgagttttaaatcaggaattgctaaagttgccggtaaatcaagctattggtttttgcataatgcccttaagggcggcaccagttttccaggcaaattagcaatgaaaattgatccagaagttttaaattctttagccaaaggctatgaaactgttattgtcacgggaactaatggtaagacaatgactactgctttgattgttgaagctttaaagaaaaagtatggtgatgtgttaactaatccatctggttccaacatgcaacaaggaatcgtgaccgcttttttggctcacaagcacaagagagttaaaagaaaaatcgctgttctagaagttgatgaagcaaatgttaaaatggtgaccaaattacttcatcctagcgtctttgtattaaccaacattttccgtgatcagatggaccgttatggtgaaatctataccacttatgacaagatcgttaatggtattaaattagcacctgacgctacaattatcgctaacggagatgcaagcattttttcatcagttgaattgcctaataagaaaattttttatggctttaaacttcctgatgacaaacctgaaaacgacttcaaggctccagtcaataccgatggtgttctttgtccaaaatgcgaccacattttacattatcatgaacgtatttatgccaacttaggtgacttcttctgtcctaactgtggctaccaccgtcctgatttaacttttacagttaacaagattattgatcaaacacctaatagctcaacgttccaaatgggcaacaagcaatattccattaatattggtggtacttataacatttataatgccttagccgcctattctgttgcacgccacttgggattaactgaagctgaagttgctcaagcttttgcagaaaataaacggatctttggtcgtcaagaattaattcactatggcgataaggatatcgatttaattctagttaaaaacccagttggtttggatgaagtcttgcacatgcttaatacagaaaaagatgattattcactagttgccttgcttaatgccaaccacgctgatggaattgatacttcttggatttgggatgctgattttgaaggattagacaaagaaaagattaaaaagatcctcgtcggtggtcaacgctggcatgatatgggctttagacttgaaattgctggctttgatccaggacaaatgagtactaatccagatgatgatagcctaattgaagaaattaaaaaactgccaactaagaaggtctatattctttcaacttatactgcaatgcttgcacttagaaagaagatggccgaaaagaaaatcattaaggctggtatgtaaatagaaaggattcccgcgggaatccttttttgtgtacaaaaaaggctgtagctctaatgctacagcctttctaattattgggatattggggctcgaacccaaacatccaggaaccagaatcctgtgccttaccaatttggctatatcccagtaaatcacccgtacgagaattgaactcataactccaccttgagagggtagcgtcttaaccatttgaccaacgggcgaatcaacatttataattatgcttttttcttctatgcttgtcaagtaattttaactataataatgctaatggatggtgaaacatgatcgactttaataaaacacagcatttaattgaatcaatggtttttgaacgcgttgttccaggcgtcaattacacttttatcaaaaataagcaaatttttacatcaactactggttttgctagtatctacccagaagttactcagctgagcccttttgcagaatacgacctagctagtttgactaaggttttagcaacagaaaatgtcttgcttaagctttatgaccaaggcaaacttaactttaccgagcccttgcagcaattcgttcctgaatttaaagacccgcgtgtacgcctttatcacttgctaacccatactagtggcattcgtggctggatcccccaccgcgacaaactagatcatgatgccttactacaagcaattatcaatctgccagtaactgacgaatttgaacacaagatgcggtatgccgatacaaactttatcttacttggattagttattaaaaagatttttggtaaacctgtccaagaagtagtcacagagcaagtcctcaatcaaatgccgcttgaaaatactactttttcaccacaaaaagatgattgcgtgcctactgccctagttgatggccatgtcttgcaaggtattccacatgatcctaaagctagacaacttggaatagattgcggttctgctggcttattttccaatcttcaagacttagttaccttcgcccaaggttatttaggactaaaggatattttaccttatagtcaaaagactgtcagccagctatttgataataaaaatccccaaggcataaaaccacgctcttggggatgggaccttcggtttgatccaaagcaaaattatccgatcattttgcacacgggttttactggtactttaattattcttgatcgcatcaaacgctctggtctaattttattgaccaatcgagttcatccgactggacacaacactgttttcttagctatgcgcgaaaaaattatccgtagttttatcaacgaaaacgccaaaatataatttatagaaaaaagacggctgtgtgtcagtcgtctttttatctctcactaaatttcatcatccgtctagtattataacttattttaacgctaatgtactagtcaaatattatttttctgctttaaacattttccagtagctaattaaaatgattaatgccattaataaagtaaaataaaaggccgcctgactaccttgagctgtcgctagtgcgtaggacgttgcaccttttttctgccagatcgacataattgctgctaagatagttgttcctacagaaccggctaattgctggctagtctgacaaactgcggttgcatcggcgcgcaatgctcctttttccacctttaaagcttcagctagcgtgttagaaaatgacattctgtgtcctaacatcatgatgccataaataataatgatcatcatcacagtcaaatttaagccccaaatagcaaataacaagcagctgatcgccattaagaagccacctaaataaagtggcaatttagctccttttttatcatataggctaccaaaatatggattgagtagccctgcaataatactacctgatagtaaaatcaaaccaccaactaaagatgtttgctttccgacaatttggatgtagttaggcaatacaaaactgataccaatattattaaattgcaataaaaagtaagctaacgcaccataaacaaacgctttttgcttaaatacggctagatctaacaatttcttggatgattttttagataatctaacaaataaccaaattaaaattgcagtcacaattaataaaatccacattaaaggattagcaaatccattactaatttgatttacgcctaatgtcaaagtaataaatgctatagctaaaacgataaatgatagccaatcaaaactatttttagtttgttcatgatacttaccgactacaaatagcccggcaacaaaaacaatgatcgcaaaaattgtaacaaaaccaaaaatccagcgccagttaagataaaaagtagtgataccgccaaatgctggtcccaaagtcggtgccatagctactactaagccggcgattcccatgtaaacgccccatttttcgcgaggcataacttcggttactaagttaaacatcaacggtgtacttaatcctgcacctagagctgaaatcagccgacctaacaataaaataggaaaattaggtgctacagcactaattacgcttccaatcataaaaccaacgcaagcaacaataaacaattgccgcgcagtaaaacgttcattcaaatatgaagaacaaatcataataatcgcaatcgccaataaatatcctgttgtcgtccattgaattatatccaaaccgacaccaaattgcttcatcatcgtaggaaaagtgacgtttaaactagtttccgtcaaaattccgacaaatgacataaacgcagctgataatactgctaaaacatttttagtattctctttcacacaaaaatcctttccacaaaaaaagaaagagcaaaaaacctttgtttcctattctttctttaattagcacagctaattatattaatacgcatactatcaaatatgctgagtatatctaatattaaagacgcttagctaaatcgtcgtgtaagttttcgtaacctggcttgttaagtaaaccaaacatgttacgcttgtaagcttcaacacctggttggttgaatgggttaataccgttcaagtaacctgaaatagcaattgctaattcgaagaagtaaatcatgtaacctaaagtatgtgcactttggtctggaatgttaacagtcataactggaacaccaccatcggtgtgagccaaaacaacaccttcataagcacgatcgtttacgtagttcaagctcttaccttccaagaagttaagttggtcaaggttcttttcatcgcctgggatcttaacatcatgacgtggattttcaacacggataacagtttcaaataaattacgtaaaccttcttggatgtattgaccaagtgagtgaaggtcagtagtgaagttagcgcttgatgggtaaatacctttttgatccttaccttctgattcacccattaattgcttgcaccattcaccgaacattcttaaacttggttcatagttttcaacaatttcagtagtgtaacccttacggtaaaggatgttacgaagtgctgcgtattggtatggagttgcctttgacaaatcagtatcagtgtagtcagcacgtgcgtctgcagcacccttcatcaattcgtcaatgtcagcacctgaagcagcgattggaagtaaaccaacagctgaaagaacactgtaacgaccaccaacatcatcaggaactacaaattcttcgtaaccttctgcatcagcttcagtctttaaagcacccttttgacggtcagtagttgcgtaaattctcttagcagcttcttccttaccatacttcttgattaacttgtccttgaagattctgaaggctactgatggttcagtagtagtacctgacttagaaattacgttaacactgaagtccttgtcgcctaaccattcaatcaagtcataaaggtatgagcctgaaagtgagttaccacagaagacaacagttggcataccgttcttttccttgccatagaaattgctgttcaagaattcaattgcagcttgggcaccaaggtaagaaccaccgataccaatacaaatcaaaacttctgaatctgattgaatcttcttggctgccttcttaatgcgggcaaattcatccttgtcatagtcaactggcaaattaagccaaccacggaaatcgttacctgcaccagttccatcgcgaagttcagtgttagcagcgttaaccatagcttgcatttcgcttaattcattttcatgaacaaattgtgttagtttactactatcaaatttaattaaactcataaatctgcttcctaactaaataaaatatttttcacaaacctattttaacaatcttgatttataaataccagtacattataagcgcattcaggcttttttgacaattttaaaaatcacataaccccaaattgctccacaagtattgaagaaaacatcatcaatatcgctaacccccgtcaccagcaaaaactgcagagtctcaattcccactgaaaacagcatccccatcagtaccgtccttaaaaacgttgctctttttgaaaaaacaatggggaaaaaaatgccaaacggcacaaagcacaagacattgccaaaagaattataaaagaaatccaaatgactgggagcatagactaatttccaagtttccttcatgaataccaagttaatatcactcaatggcctagagaaattaaaatcaagctgccacggaaagtaggtatttctaaaagttgtcagcatcaaaactaagattatgtaaaaagaaaagacccaaacgctagcttcagacctaattgatcttctgcggcgcaccaaaagaagccaaattaagcgcaatacagcaaaaattaaaaaataaaatattgttttatccagcgctaataaggttaatttaactaatgcaaagtggttaatattagttgcatactgtttagctaaaaaactataaagtgggcccaaaaatagcatactttgcctctttccaaaatattcattatagattatacctattttcacggctggaaaatcttaaaaaaaagataactcttagcaaattattgttttaaaagaggtgaaccattaaaattaaaagatgttaaaggagcattatatggaaaaaaagaaaattatcagttttattcaaacacgaacgggctttttaacccttttagttgtttgtttctggctgaaatatatttttgcagcttattttgatttcaatttaggcttgagcgacccgtatcaacatttcattatgtggctcagccccgtagggtccgccatcattttaatcagcttcggtttttatattcctaaaccgctgatctcttacatcacaatgttaattttagactttgccaatacggcattgctttttgcaaatattatctactatcgtcaattttcggactttttaacaattaaaacgatgtctaacgttggtaaagtttcgcagggtctaggtaaaagtaccgttgcccttctgcatccaacagatattattatctggattgatttgatcgttattgttactttactgatcattcataaaatcaaaattgatcaaagatcttacggcttatccaccccatttgcgattacctcagtaggcgcatttgtcctaactcttaacatttttttggcagaaacctctcgtccgcgcttattgcgcaacacttttgatcgctcctatgtcgttaaataccttggtattgacacctttactgcttatgattgcttcaagagtgcgcaaaatgttcaagtcactaaaaatgccaacgctgcggacttgaaccagattttaacttttaccaaaaaacaaaatgctgctccatcttcctcatattttggtattgagaaaaaacgcaatgtgattatcatccacttagaaagtttccagcaatttttaattaatcttaaggttaatggcaaagaagtgacgccgttcctaaattcactttatcaaaataaacatacgctcagttttaacaacttctaccaccaagttggtctaggtagaaccagtgacgcggaaaacatgctagaaactagtacttacggtattcccgacggatctttattcacttctttaggttcggaaaacacctttcaagctgcaccgcaaattttgcgtcaagatggctatacttccgctgtctttcacggcaacgtcggtagtttttggaatcgaaatgatgtttataaaaatatgggctataattatttctttgataaaaattactatagctcccaaagtaaagatgcaagcggctatgggttaaaagataagctgctttttgccgaaagcgttaaatatttagagcagatgcagcagcctttctatgctaagttcattacggtaaccaaccacattccgtttaacttagataaagaagacaaggaccctaactttaagactacaaacactgccgaccaaactatcaacaattactttgaaactgcccactacctagatgaggcattgcgtgaatttttccactacttaaagtcttctggtctttacaaaaactcaatggtagtcatttatggtgatcactatgggttaagtaattctgaaaatgaaaccttagcaccaattattggtgaaagctctgacacgtggaatacttacaataatgttcaaatgcagcgtgttccattcatgattcatgccaataatttgaaaggaaaaattaatcatgaaattgctggtgaaattgatgtcttgccaacactgatgcatttgctcggtattaacaataaaaactatgtccaattcggtagcgacatgctttcgcctaaaagacaaaattggatcgtctttcgtaatgggaccattgtcagctccagatatatcatagttggtgctaaaggaatcaaaggtaccgtttatgaccgagttagcggtaaacaaatcattaattttactcctcaagagaaaaaagaaatctctgagctagcacaaaaggccaaggcatcattagactattctgacttattaaacaaccacaatttgttacgcttctacaccccaactggctttgtccctgctgatccaacccaatttgattattccgtcaattatcaaaaaatgatcgctatcagaaatgaattagctggcaattccacctcgctttatagcagacatcgcggtacaactactaatctttaccgtactgatgccgctgaactaaaagatagaaaacaagaaattacccaagttcctgacagcgttaaaaatattaaagagaatacgaaaaacaaaaatagttcagaaaataccaataactaaaaagaacgcacagacctttcaaaaaaactgtgcgttcttttttagtttttagctacaaactgttcatagcccttgtcataaaaggtcacggtgaatgtggaacctttacctggtgcggaaaatacttctactttgccaccatgttgcttaatcaaagaagaaacaatcgcaagtcccaagcctgattcgccagttcccattcgagcacgcgatggatcagccttgaaaaagcgttcaaaaatatacttagtctgattcttgctcatgccaataccattatccttaaccgataattgtgttccatgctctatccgtttacccgaaataataattttgccatcatgagtgaattgaatcgcattttgaactaagttaaccattacctgggtaaaacggtcacgatctgcataaataggcaactgatcaggtgcctctacaaccagctcatcgttggctttagttgcattttgttttaattgcgacttcaaatcatgcagaataattgtggcattaaagttagtcttaaccagcataatttgattatttcgaatcttttcatagtccaaattttcattgactaaccgaattaatcgtttagtttcgcgctgcattaacgcgattgacttcggtttagaatcctctgggatagcatcgtattgcaagccctctagaatgccattaattgttgtcaatggcgtccgcatttcatgagcagcatcagccatgaattggtctcgtcgctcttcttgagccttaacctcttcgttcgactgcttcaaagcctgcaccattttattgaaattctcagccaattgatcaatttcatcgctatctttatgctcaatttgcacattaaagttacctgatgcaactttttgcgtagcacgtgataatcgcttaattcgtttagttgaataataagaaataataaagctcagcaacaatccaaccgctacagtaattaacaatgcacgcaacaaattgcgtttagccattaaaatcggtcgctcaacatgctttactctcgatcctatccaaacaatgccaacaagatttttgccattcatccatggaaccaaaacccccgtgtaggcatccttagttgaactaatcggtgaattttcattatgattattttgaattctaatctcttgcccattttttaaagtagtaaaaacttcttgtgaaagctgaattctagcctttgttttgggataaatctgctcatttttatcattaaaaatacgtaaatgagcatcatcaccacgaagaacatattctaattgattcaagaagttattgctaagcaatgcagtcccattttggctatcagcttccgccaagtttcccaaagaattagcatagctttccatccgctggtagttttgcgtataagcttgattacgcgcataaccaatctctgagtaaccaataatcgagatagttgtcacaataatgagtaagaaactcaacatattttggtaaattaatttcattatttgacctgcgaatcatcaaacttgtaaccgacgccccaaacagtttggatcaccttggcaccaaccttctctaatttctgtcgaagctttttaatatgagcatcaacagttctttcttcaccataatactcatagccccaaactagttctagtaattggtcacgagaaaagacttgtttaggcttttgtgccattgtatacagcaaatcaaattcttttggtgtcaaacccattaccggctgattatcaaataaaacttctcgtctattttttgaaatcttcaaatgatcggtcgtaatctcatagtcttgattatcttcttgagtatgagctggttcttcttccatcatcacgcggcgatgcaaagccttaatgcgggcaatcaaagcaattgggctaaatggcttagtgacatactcatcagctccgatacctagccccaacacttgatctgattcactgccacgagcagtaagcataataattggcactgtcggcgaaattgcccgtacctctttagctacttgaatcccatctttttttggcaaattcaaatctaacgtaatcagatcatacttatccgcgttctttttaaacatatcgacggcttcgacaccatcaacagcaatgtcttgttgccaaccttcttttttgaaaaacattcccatcatttcagctacggaagtgtcatcttcgaccattaatattctcaaactcattatcaatccctaaatccttttgttctcttatgcttcacttgatcaggatcgacatagtcatgtggcaattcatgtcgtttagacaaaaatgttttcaaacttttttcggtataaacaattggcaataagataaataaataaaatgttaacagccaaatgagaaaatagcgatcccaattcaaatagtgaatgattactcctaacagtgcttgaataaacccaaacaggatacaataccagcttgcccgtttctgagcaaacttaaaactatcctggttaacttgcgcaagataagataaatagccataaattcggttgggccttttggctggcgtaatcagccaaatcaaccctaccgccaccataactaagccacaagcgacatagatcacgatttctcactcctaattctgataaatttaaacggttattcctcacctggtgcagacataactattctcattttaccagtgaaagtgaaattcttcatctcatttggaataattaaattagttcccatcttcaaatcatatgacttgccatcagcttctaattttccttcgcctttgataacggaaactaacaggtatggatgatcctttaagccggtcttccaagtaccatcaaggtcaatttgccacaaataaaagtgtggtgaaagtggtggttcaaccaatgtcttaatttctgcatcttgatcttggctagtcttaacatctaacttaggatcaacatggggaacagtggtcacatcaattgacttttgagtatgaagctcacgctttttaccatccttgcccacacgatcgtagtcatacaagcggtaagttacatcacttgactgttgagtttcaattactaagcatcccttagttaaagcatgaattgtacctgctggcacatagaagaaatcgcctgctttaaccggaacttttctgagcagcttatcccattcgcctttgtggatcatatcagctaattcttcacggctttttgcatgatgaccataaataatataagcacctggatcagcttgcattacataccaagactcagtcttaccagaatcattttctactttgcgagcataatcatcatccgggtgtacttgaactgataaattatcattagcatctaggaattttaccaataatggaaattccttggccttaggattgccaaacaattccggatgcttcaagtaaacatcccgcaatgacattcccttaagtggcccatctgttacagttgacgcgtcatccttgtaacctgaaataatccaagcttctccaacttttccttctggaatatcatagtgaaaaatatcatctaatttacgtccaccccaaatttttggcctaaagtatggggttaaaaataatggttccatttaaatcacctcaattaaagtataaactttaaggcagaataaatgaaacccttttcttagatatatgtatactatttgttttacatgtaaagctacttgttatacttacgaatacctgtagctaatctttgcatcccatccttgaccatcgtcaaaggacaagctagattaattcgaataaaatcatggccatttccacgataaacactaccagctgaaataatcagcccagtttcttggcgaatgaactctgctaattcctgtgaatcagtactgatcttttgcacatcgatccacatcaaatatgtcgcattgcccgaaatgatttgtacttcaggaatgtttttttcaataaaattctgcacatacgcaaaattttgctttaactgttttttcaaagcattaagccaatcatggccttgctcataagccgcaatcgttgctggaatcgccaataaattaggctcggctacttcatcactatttaaaccgcggttaaccatattgcgcaaattttcattaggaacaattgccgtagcagaatgaagagcagcaacattaaaagttttgcttggggacactagtgaaatcacactattttgtgcttcacctgttacagaaaaggctggcgtgtaatctggaccttgtctaaccaaatcaccatggatctcatccgatagtaatgttacatggtattggtgacaaagatccgcaattttttgtacttcttcactagtccaaacttttcctactggattatgtgggttacaaaaaatcatcaaagtcgttagcggctcagctaatttttgttccaagtctgcccagttgatcgaataacttttaccatcgaaagctaaatcactcgacaaaacatggcgcccattattcaaaatggaattataaaaaatattataaactggctcttgtactaaaacattatcaccaatatgtgaaatacggcgtacaattgatgaaatagcagggactactccagtagtaaaaatcatccaatttgtttgtggccgatgattatgttctgtttcataccaatcagcgacagcattaaaataatctgcttgtgggaactcataaccaaatgcacctaatgtcaatttttgttgcattgcctcgataatttcaggtgccgtcttaaagtccatatcggcaatccacattggtaattcatcagacttcacatcccactttactgaatcagtctttgacctatctggtgcattttcaaaatcatattgcatatatctcactaatcctttggtgtttggttcgtatcagaatgaacaatttttgtacctattttcggacaatcaagctcggttttagatggatctaccttatctggatcgataatcaaagtaccaatctcaggtaccgtaattttaccagaaattgggtttttaatactatcaatctttgtattaagctccacatctaaattagaaacatattcaaaagctaaatctgtatgaatcaaggaaccattcttaatctcaagctgatcaatgtagttcaagccctgatcactttcaattttacaattaattaacgtaatgttgttagtattccaagctaaatattcaccatcaataattgaatcgtaaatagtgacattattgcaattccaaaaagcatctttagagataaaagttgaattatgaacttcaatgttttctgcaccatcaaaaacataatttcccacaacggaaacgtgatcaagataaatattctggctatctttaccaaaataatcaccattaatttgagaattggtaatcttaatatcattacaagtccacattgtttcttctgcgttagcaaaatgaacattatctaaaataatatgacttgtccttctgaataatttaggtgcctgtaaagcactatttttaattgaaatattcttggtataccaaattccagaccgtgacatagtttcaaacgtggtattttcaactttcacattttcatcataccaaagtggatatttccatttaaaaattgaattctttaatctgatatttttagcttcttttaagggagattcaccactgccaaatgtaataccatcaaggattgcatcagttaatccataaagaattctttcacctgcaaaatatttatttttgtattccataattgtttccacctttttgttaatttaataatcattaattttaggacagtattcattatatgatttctttcatgcaatgtttaatacttatttttagtgataatgcataacaaaaatgcatagcagataaacgatttagcaaaacaaaaaaccgctctagaacaacatctagaacggttatctatggagatgaggggaattgaacccctgtccaaacgcatctcgtcactgacctctacgatcatagttatattacttgaacttcactagctcaaaacgccatataacagggctagaatgggctagctaacctgttaagactctttttaactattcaggtgaggtagttaaacgtaactcgctaaagttgatactcggtgtcagccacgagtaaaccgacaaggagcaacacatgcgcttaaattaagcagctaatgcgtaagaatttttgttatttgcagttatatttaactgtaacgtttttacgtagtcgtaacctacgaaccgcagtcaatgcgggtctacgcctgtcgaatcccaaaacatccccttgagatacttattcattatagcatagacacacattacatgcgataaaaatgcttaatcaatattagtcaaacgtaccacatcacgttcaatcatcaattcttcattagttgggataaccattcctgcaactttggaatctgtttttgtgattagtccttcactaacactttcattagcttcattatctacaacaacacccatatatgcgaaagcgtcaagaaccgcttttctcacaccagtatcatgttcaccaataccagcagtaaagataattgcatcaacgccgcccatttcggcaatataagcaccaacgtagcgaataatacgattaatgaaaatttttcttgctaacttagcccgttcgctatcactttcacgcacatcgcgcatatctggtgaaattcctgacaagcccaacaaaccagacttattattcatgatataaatcatttcatccatcgacttatgctctaccttcattagatgttgcacgagtgaaggatcgatatcaccggttctagtagccattgtaattccggcaattggactaaagcccattgaggtatcgtaagacttgccatccttaactgcagtaattgatgcgcctgatcccaagtgacagatgactaactttaagtcttttaaatctttacctagtaatttagcagcacgcggtgctgtatagcgaattgaagtaccatgagcaccatatttacgtacaccatatttttcataatattcataaggaagtgaatacaaataatgtactggatcaagattacggtgataagtagtatcaaaaaccgcaacttctggcacatttggtaaaacattcataaaagcttcaattccgcgagcctcagcaggattgtgaagcggagcataatctgacaattcgtagatcttaggcagattttccttagtaataatagtagaatccttaaagtactctccaccattaacaacacgatgtcctacaccgacaatttcagttagttcttcaacaacatggtatccttttaaaaacttgatcaataagctaactgcagcttcttgatctgggatttcagttttttcaacgtgcttagtaccatcagctaacttaatctcaaatgatgaatcttcaagacctacacgatcagccattcctttggcaagaaccttttcatctggtaatgagaataatttgtacttaaaagatgaactaccagagttaattgccaaaacttttttcataaaaattaattcctcttctttcaaaaaaataagtgctttatcaattaatgattaatctttgcataccactcgttaagtttaacattaaattgaattaaagtctcttcttttttcaaggaaccaagtttggtaagcaaaacttcacttgctttggcctcatcaccgtgattttggaaaactaaaactgactttggattaaacttgttcttaaacatatcatctggcaactctacaatcgccttcaaatagactttcttagttaaccatggcataaaatcagcgccaatcttgcctgacaaaatagacttaggaactaccaaaaaggcatagccgttaggctttaaattattaataatttgttcgattaacaacaaatgagcaaaagaatgacctttcttagcctgattttcaaaattcttggcattctcatcaactggataatagcctacaggtaaatcacttacaattgcatcagcgttaggacacatccaaggcattaaagcgtcttgatgatataactcaatgtcaatattattcagatgcgcagccacatctgtcaaacttaacatatcttcatcgttatcaatccctaccaattgataattatccttagaatgattgagtgccttaagttgagaaataattgaaaacaacaaattccctgtacccacggcaggatcaacgatttccatcttttgatcttttaataatttatgcatcaacattgctactactgtagcaattgcaggtggagtaggcatttggttaacatcaaagccatcatcattaactgcctttaaagttagaaaagtaaagacttgagccttttctttttggctaatttcgtcataatctattgcttgatacttttgacttaattcagccactgttttttcatccggtgcaccattttcaaccttaatcttgccactttctaagttatcaaaagtctctactaaggcttctgtaaatgaaacatttaatgccgtttgcaaagtttgcacacagtctaaaaactgattaaaaagtttttccaaattttccatagcggtccctccataccttaattattttatagaaagggataaagaggtgcaaggaaagtcaatcatccgttaagcattcgataattaggcgattgttctccatgctagcatgataaatatcttgatacattttgataaacaaaagcgtggtcattaaaactaatacactacttagtaaggcactgccttttacgttatgcgtctttttctttggttttagcatttttcttttcctgttcctcatcaagctgaaaaactaaatctgatgcacccttatttttctctgttaccctaataatgatgctatctttagtggttttaaaagcagccttttcaacgttaaataataacggcatatagcctttccctgcaccagatactttaagtacgttctttttatagtattcaattcggtaagtagttgcatcgcctttttgatcgatgcacttaaaggaagcactattacttatagctaatttagttactggatacactgccttaattttgtcagcccgcataaaattttctagctgtacataagcataggctacttcattgacatgctgattttgattcaagtttgcttttttaacactcaacaataaattttgtaaaattagcagcaccatcatagtaataaaaagcgaaaacattgcttcagctaacataaaacctttactctttgaccgcaaaagtttgtttagtcgttgcatcccaaacatgattacgtcctgccttttgataaattcgatcgtgaactgttacttgctccaggtcagttttagtcagtatatggtaagcataagcacgatctgtttttaattccatctcacgaccatttttctgattttcagctacagttatataaaagcaactaacagcaatcacagcaattataattgctataaagctctcaattactagaaatcctttaacttttatcattccgctactctcccccacagcatttgatatttcaggcttttttccattccgtagccactaaaagtcaccgtacctggtttagaataaccagtcaggttgaatttaaaatgatccaagccagtaattttgatattttgatcaactggaatacttttgtgatattttccgccagagaataaaatttgattggatttagctagatatgatacgcaaatagtaacctccttgatcgtactgtacctcgaagtttgatcaagtgccgtcgtaactcttttaacagtattatcaaaaatcagtttttcttgatatctttttaactgcaaactaccaatcaacaaaatgccacagcaaacaccaagtgtaattattacttctagtagggaaaagccggctaatttatttcttttcaacgacttcgccactatctaacgtgaaattctttttagctttagtaatttgatcaccagttaagtaatcgtccttttttagatcttcaaaatctttaggttcaccatatttatccttatataactcaacttgcgtttgcacagtagtcctaaatgcatccgcagttttagtttcagcattcttcttttgattaatcaaattaggcacaattagcaaaatcaaaatcacgataatggcaattaccacaaccatttcaatcaaagtaaaaccctcttgcttgcggcgcttagccataatgtttgctaaatacttcttcatcttctctttcatttttaacttaatcctcttcttcactctatttttttacttttatctttaatgtcactttttctatagtccttgcatcattgaatacattggtaataacagcttcaaatacattccaataatgcataagccaattaaaataaaacaagctggttgaacattgacgactaatttctcaattttttcagttaaatccaaaaataggctacgtcctaataacaaacagcgcttactcaagctctttcgctcagagccagtctgcaataaaactaataaactattaggcaaaaaatcctctgcattaataatttcttctaaattttttccttcagctaaatcgtgccctatcttttgtcccagtgcttgctgcaatgaacctttctcttgatctgccgcatattcgcacattcgctgcaatgaaaagccactagctagcagcagtccaatgtcataaaccaacaaataatgaatatacagcataactacctgcccaattaacggatatttactcagttttttcattgatgaataatcctgtttattgagcaaagtaacgatcttagcaaaaaaatataagcccagcaatacaataatgatcagaccaatcatgaccatatctcctgaatgatcactgctatcgctgaattgtgtcgaaataaacgattgcataaagaccagtaaaatcaccatcattatcgctaaaaccaacggataagataattcagcccgcagttttttcatctgctcctgttttagtcgattcaacgttgctaaatgctgcaaacattcaactaggtttccttgctgtaaagccaaattaacctgagttactgtcgttttagaaaagcctagtttaagcagttcagtactaaaacttgctccttctttcatgcgactagccattctttccatcaactgacacctttttggccacaatgccggcattaattcaattgaattgagcaaagaaaaaccattatctaaactatgttttaaataatccaaaaaggccaattgttcttcgccatttaacttatcctttttggaattgccaatatacttcatgattaatttctcctcctttccacaaacgctctagattttcctgccaattaacgaattcaccacgaaccgatttgcctagctctttttttagcaaagaatctgctgcaatatccatcaagcactttaattttccttgactgactaataatcgctgatacgacactgcagttagacaatttgtcagttcgtcacacctaatacctaatccctctagtcgagaaatagtttgcaaagtacttttagcatgaactgtcgcaaaaaccaggtgtccacttaaagctgcatcaactgctaaacgtgctgttccttgatcacgaatttctccaataattaaaatatctggacgatgccgtaatgccgcctttaacaggttttggtaatcaattcccgcttcgttattgacttgtgcttgcaaaaaagaagactcatgaatttcaacaggatcctcgattgtcatcactactttgttttggctcattttcttagcaatttcatacattgtcgttgtcttgcccgagccagttggaccactagtaataatcaatccgcgactcttagccagcttttcaattgttcccagctgctctggaataaaatattgactatggtcaatcccatagatgactcgaataaccagtgactcttgatcggaaaaatctcctaagctagataaacgcaagaaatattcatgtccttcattctcatatgtcattgcgccaacctgcgggcgacgatgttctgcaatatccatctgagcactgtacttaaaaaaattgataatttcctttcccgtctccaaagtaaaacctgcatattcaattagacccttaccggtccgaaatttaaccatcaagttttcttttttcgggaaaaagaaaatatcacttgctttaactttaattgcctcaatcaataattcactgacaatttctttgatcttcataaaaatcctccttttttgcctcacattatttattacgcaaaaaaaatcgatttttttgtgagaaatttaaaaaaacacaaaaaattttctcaactctaaaaaacgttgatctaacagcatttcaagattaaaaaaccattaaaaaagtacacaaaaaaaatagcttagccattggctaagctatttcatcattaactaattaatcttcatcagccgctgcagtataaacattttgaacatcgtcactatcttcaagagcatcaactaaatgttcaaattgttccttcttatctgctggaactggagtggtgttttgtggaatcatagttaattcagcatctgctagtttgtaaccatccttaattaaggcgtcacgtacacctgcaaattgctttggatcagtgtagatttcgtatgcatcatcactagtttgaagatcgtcaccaccagcatccataacatcaagtaatacttgatcttcatcagcatcagtagttgaacgatcaattacaatgtagcctttacggtcaaacatgtaagcaactgaaccagtagcaccaagtgaaccaccgttacgagtgaaagcaacacgaacgtccgaagctgtacggttcttgttatcagtcaaagcttcaacaaagactgcaacaccacctggagcataaccttcgtaagtaatttcgtcgtagtgttcttctgaaccaccttcggccttcttgatggcacgcttgatgttatccttaggcatgttgtttgaacgtgccttatcaattaccatacgtaatgtaggattcccatcaggatcaggaccaccactctttgcagccatataaatttcacgagataacttttggaaaattttacctctctttgcgtcttgcgcattcttgcggccttgaatattgtgccattttgaatgtcctgacataaggatccttctttcttttttctaatattaattaacgatattatcttaactcacagcacctcaaaattcaatggtgtcaaccatttaaacttgttttttctggtcaaaaaatctgtgtttaataaacaatactagcattatcagcaaaattgccgttaatgctcctgctccatcaagcattacatcatgcacgctcggtgttctatcacctgttaaaaattgatgatattcatcaaatacagcaaatgcaattgccataaaccaagttaaaactggtgctacccatttgattttgaaaattcttcttaatcctaaatagccaaaaccacctagtaaaaaataagaaccaaagtgagccattttacgtaaaacaaattgggccagccctgctcgaccatcaacttgcacattgtgaatacgaccaccgtaagtaaaatcccagccagcaacgatattctctaaccagccaaaataacggttaattttattgtcatgaatttcctgctgttgataagtcattgaactagaaatgaacaatgcaactagcaccaataaagcaagcagtaaaaagattttttctcgtttagtaaaatgaaatttatccattgctatttcttctctcttttttacttcttactttaacaaaaaacgggttaaacttgacccgttttataaattatttaactttgcttaatgcttcatcaattggtgtgtccccatcatgcataataattacttgatgaatcgtattatcatactttaggctatcaaccaatacctgagcaacatcatcaatcgaattttctccaccttctggagtaaatgatgtcttacccgttgctggcttctccattaagttacctggttgaatgatcgtataatccaaattagtattatgaattaaccattcatcagaaaagtacttagcaatatcataatcaataatgcttgcaagagaaggaatttctgcccacttgtcttggtcaagcgcaaaggcggagcttagttgaacgtaacgcttaacgccattagcttcagcagccttcatcagcttaactgcgccatttaagtcagtttgcaataagtcctttccacgagaacctgctacaaaaatcactgcatctgggtgacctaattcttcggtcagcttattaagcgaatcatgaaaatccaaatgttgcacccgcatattaggagaaataatttcaacagtattttctcttcttgcacctgcaattacttcatagccttcatctatcaatcttttgattacttctttgctcactctgcctgtagcaccagctacaaaaactttcattgtttttcctttctaccagctagccttcttaacacctggaagttgacccttatgagctaattcacgcatacattctcggcataagccaaacttccgataaactgaatgcggtcggccgcaacgttcacagcgcgtgtattgtctagttgaaaattttgtttcttttttgttacgaataatttgtgatgtttttgccataaatacctcttatctgcgtctatttattctttgaggcgctggctttcttttgctagttaatagtcccaacgccaaaataataattccaattgccaatacttgtccagtcattaacatccccacctttctttttgactcttactttttgttggtgtattatacatgcttacctataataagtaaagagatttgattgtaaatagaaagcgttttacactagtctgatacattccctgtcaagtagacagtagaattacataaagcttttattcctcagttgattaataatcagctgaggattttttggcttctcttattttcttttcgtgtattttttgccagtatttctcaattcgatgatttggtgcaatagggcaattcttaatattgcctttcatcgcttctttgcgcatttcaccagcagttaaaccgttaaaacgtttctgtggatcttcattaatgtagtaatctattgtcttacaaatagaatcattaagttcatcataactggccacttgaggatgaagaataactcgcatttctttgataatgccttgccagccttccattggaccattatcaatacagcagccaacacgagacattgattgcgtcatgccttggtcttctaattggttttggaaaggtgcgcgagtaaattgaaaaccacgatcactatggaaaagcggatgagcattagggtatgctttaacagcctgcttataggctgcttgaactaaagcagtatcgtttcgtttactaattgcgtagccaacaggatagcgatcatatagatcaaacacagtacatagatatgccttaggcaggttagcagcaacgacttcagtgatatctgtacaccatttttcattaggtctagatgcattaaagtctctttttaacttgttttcggccgttttctcaggcgttgtatgcttgaactttagcttctggtatctaggcttttgtgatctaatgccattgatacacatcaagcggtaaacagttttatgataaaccggcttttcatcagacatctgtcgattaactgccatggtcatcttttccgtcccaaacagactgttgttagacttagttatttcaatgatctttgcttcaatctttttgtctcgttcttcacgcttactcggcttgcgcttaggatcaaagtatttgtaataagctgagcgtgctattttagcccatttgcacattaaatcaatcttccaattgtacttttgatggcagtcatggattaactgatatgtttcttgtttccagcgtctttttattgcggcttgtctgtatcttggttgtccggcaagcacatcctttctaactgatctaatttttttaggaattcgttcttagtttgttcttctttgagctgacgctctaattccttaatttttcgattagccagttctaactcagttagctcttctggcttcttatgtctgcctcgtttatctgttaatcctgtttcaccattagctagatatttgtgtgtccagctgtaaacctgctggtaagaacaatcaaatttgacagctgtttgagtgtaattcttgtcgtgattaagacagtattgaacaatctgaattctttcttgctgggtagtttttcttcttgctttagtcatatagacctccggatggggatcatagtcccgattttctatatgactattatacttggaaacccattctgatactgttccattgcttctaatgccatatttattagctaaagaaggtaacgacattttgccagctaaatattcttgaacaaccttttctttaaatgccttagagtaatgattattgtattgagcattacttagaagggtatcacgattgctttgatattgatgaacccatcttcttacttgcatcgctccacttttacttggcatcttaagccgtttagctatttcaacgctgctcctattaccattcaagtattgttcaactgcccatatcttttgatcgaatgaatatttactttttctggacataaaaaatcccacctccatggataattgaatactttatgtatttaaatcgtccactttagtgggattgtatcagtcacagttctttttaataggtaaaatttatttgaatactttcatctaagaaaggaatagaatgaacgaaaaatgtaaaaataagtcgccaggattcttatctttttagggagtaattatttttaaatagagaaggatgagaattaattggacgatttaacatcaacaaataaaatgaaagccatcacttggcctgttttgaccttgatggcactttgtactgttatcggcttggacgatatcatgtacaacttccaaaaccaagggatgccagttatcacctcttggattatcatgtgtttgctttatgtaacaccttactcattaatggtaggacaattaggttctacgtttagtgaagaaggtggcggactttcatcatgggtccgcggtactgacggagaatttttaggttacttcactgcttggacatactgggcagcctcaattccttatgctgtagactccgctaacgaaatcattgtcgacctaggttgggcattgaccggttcaaagggattccaagataaaattcctactaccatgtttgctgctttgactttcgttgtgttcattgttttcattatcgttgaacaccactttgccaactcaatggaattcctttccagtattggtggtggtttgatggtcattatgactgtcttgtttgttttccttgcctttgttggtttggcaaaatcaggcggtcacatggctacccaaccatttacttggcacacaatcattcctaaattcgacttgcactactggtcaaccgtcggaatgttaatctatgccatgaatgggtgtgaactggttgcaccatatgtaactaagatgaagaaacctaagtcagacttccctaaggcaatgattactttagctatcatgactgctttcttaactatccttggttcatttgcacttggtatctactttgacgcataccacattccaaacgacttgaagatgaacggtgcttactacgtattcgacatggttggtaaacaattcggtatgggtaaattcttgctttacctctgggcttggacatcattattgttcaactgtgccttggttgccgtattgcttgatgccatgactagaatgcttatctccgacactggcgataagtacatgcctaagttcttacgtaagaaggacaaaaacggcttaccaattaacggttacatcttaactgttgccctttcatcattcatcatgatcttaggtatcttcttacctgacatgaacgatatcttcaactggttgcttaacttgaactcaatcatttcaccaggtgttacctgctggatcttctactcattcatgagagtaagaaagaactcaaagaagtacccatcaaaatatgtctacattaaaaacgataaacttgcttggcttgttggtcttgccttgttagttgttactgccgtagcaaccatccttggttttgcaccacaagatgttaagcaaggcagtggcctttggtggtacgaattgatcattaatattgtagccgtaattgtcttaattggtttgggtgcaattttacctggaattagacgtcgtgaagaagaatacggtattgcttttgacaaatctcaatggatttggatgggaattatcattatcggttctattattcttgacgtatggcttggtagtaccaagattccagcaagaatcacaatgattatagttgaagctatcgctgcattaatcattacttggattgttggacgaagaaaaccccaacaagcaaccatataaaaactaaattacaaaaaagctcgcaaataatgtcattaattatggcatgctttacgagcttcttttttgctcaaattgatatcactttcactctatattctataatcatatagtaatttacaattattttgtaacccggatttaaaattgaagtgcaacactaagtgttaaacaaaaaggccatgaagacctaaacttgaagtgacgaaaaatcaagaaaggaagatcttcatgaccaattcaaattctagcatttctaagcactatcatcaattaaccagcgtacaacgtggacaaattcaagcaatgctggattccggcataacttcccgtactgttatcgctcaagaagttggctgccataagtcgacaatcagtcgcgaaatcaaacgcggaagcgtcctgcaaagagacagcagctatttattgtatgagcactattacgctgatactgcacagatttattatgagaagcgtcgcaaaaactgctatcagcgcaatccattgaagcattatgctgtctttttgagaatgctctccagacgctttaaagctaaatttgatgccaccagcatcgatgagttcgttggtgaattccaaaggactatgccaggctacccttgtcccagcacaccaaccgtctatcgctatattgatcagggcttgctggacataagcaatattgatctgcctatgaagctcaaaagacgcaggaacaagcgtcatcacagccatggcggtcacgctttgcacaagaagcatcttggcaattccattgaacagcgtcctaaggaggttgaagacagaaaagctccgctgcactgggaaggagatctggttaaaggcgtcagacgcaagaatcagcctgctttaatgactttgactgaaagaaccacacgctttgaagtagttatcaagattcctgactatcgggcaagcacatgccaaaggctgcttcaaaaggagattgacagacatcctgcctggtttaaatcaatcacgtttgacaatggctctgagtttgcggatatgaccaagatcaagggctgccagatttactttgctcacccatattctccatgggaaaggggcaccaatgagaactgcaatggtcttttgcgtcaattcttccctaagggcaagagcatgaaagacaagtcaaaagcttatgttcaacaggcaactgatgccattaaccacaaatatcgccgaatcctccaatatcacacagcagaggaactcttcaagcaatatatctcttcataacctaactgttgcacttaatttgacaattcaggaattattttgtaattttatatactcaacaaggttagcactaagtgttatactaaagtataatggagataaggtatatatttatagaattatttaaactgagactgaataaaatgaaaaatataagaaagaagattatagtatttctgctagccttggaatgcttagctttttgtatatcctttaatagcaaagtgtatgcatcatggagtcccgcttcagaatggaaagaaaatggctatcctactgaggactggacaacagatcaatttacataccatcaaataggatttattaatgatcctaaaaataatcaattgttgttatatgtagacatttgccctgattctaaaaccaatagaaatagtcatggatatgaaggtggatatcgtcaattgcagccatcagcctacaatataaatgttggtaatgctacatacagtgttaatttagatgtcaatccatggaatattcaaaatggaaaatctggatatgcaggaattggagtatgggatcctcaaactaatcaatataaagcaactaaagataatctctgtcattattatgcagatagtgatggccgccaatcggccataattaagattccttacaatatgtttaacagagatgacctaaacggatcaactaaaatgacaatgcaaaatcctaatttgggtggcaacacaaaaatcacaatcagcggagccagcaccggcccatacatccctgccatcatcgcttttgtcttagcttcaatagccgcaattagttattaccataaaagaaagttagtacgtcatgaacatcagtaaaatatccccaaaaatatttcattttggaaatggtgtcatccgtgcctttttctttggcttgattataattagcttcttcgctgtgctctcatctactaattggctgccagatgcaaaaactacgaccggcttaacttacataatgtttgcactactattaattttagttttaagctggttctcctttccaaagtttcaaatgttcttaaaaacaatttttatcaagcataaatggattacttctattatttgtttagtccttgcattaatttggcaaattcaatttgtctacttcgtacatcccgcaatcggatttgatgttagtgctgttcacaataccataatcaatccgaatctacctgaattaagaggatatttcagtgttaactacaacaacctatccatcctccttactctaagacaagttgccaatatctttcattcaaccagttggttaacaatggctttatgttcaacacttgttacagatttaagtgttttagtaatcatcgctacaattgcgataatcaattttcaaaaaattcccaatatcatttatattctagctagtctgcttagcatattccctatttgcatggttccttacacagatgtatggtgcttgctccctatttcactttcaatttttggctggagcatcgctacccaaaaatcatatctagttgtcattcgttttttaggagcaattttatccggaattagcttagcatgtggcgtttggatcaagccttcagttgctgtttggggtattgccgcgattttaacgagtttactctatattttaaaaaacaacaaagtaattctaacttctattttctgtttaactattgcagcaagttttgttttagcctatcaacctcttaaaaaagcggttcaagatcagcattacatcatcgttaatcaaaaacgccaaattccgatgatccacttcatcaacgttggtttaacacatgatggtgcctatgatccaaaagcagctttaaaaatggatgagcttcctactaagaaacaaaaagttgtctattctaaaaagatgatcatcaagcgtcttaaaaaacgcggtccattgggttatttacaatttctagttaaaaagcaaggtctaaatactgcagatggtacattcggctggctgcatgaaggccattttattatttccaagcagccatcagaaggctggcgaggattcttagcggaatttatctatccaaatggaaaatatgttattgagtttagatttatcgctcaaattctttggacaattattatttttgtattgctattcagttttcaaaaaggcggctttattattcaaacgctaagaatggcactagttggcggttttatattcttacttctttttgaaggcggacgtagtcgttatctagttcaattcttacctattatcttgattttaacagcactttcagcagacactgctaaatataatttagataaaattttgacagcaattctaccgaaaagaggtttttaaatatgaatcttagtttaatttaccctactatctctttaccaatcattacaattagcatggttgtaactcaaacacaaatagaaaaagtatgggagaaacagctagaagactggcgtcaccatttatttatcatattgtgttttactactttttacatactccaaactgtttgtattgcaaatgtaaccatctttacctttaaagcaattgcttatatgtatgtcattccaacaattatggtattacgcaacaagcaacatatttggtggtttttgctttttatcacaccactaattccgttacttattggtcttgatttaaagagatattcatttataaatatccccgctactttattgcagatttcatccatcgcattaatctgctttattctaaatcattgtcaaaatctttcatatcaagttaagtatatcattgccctttattcagggagtctcatccattttgtacgtctttatatagaaaatgaattacacctcacatttttaatcgctttgacaatcggaactactttcaccatcattggtgaaagctggcgttattattttgaaagtcgacatgaagaagcaattgctaaattgcattacgaaagcaagcgtgatgaattaactggtcttcttaactttcgcgcttttgaccaagaaatgaaaaatttatctaaaagacctaatataactaatacctatattggcgctattgatatcgatcattttaaagtaatcaatgatacctatggtcacttaaatggtaatattgttctgcatactttttctaaaaaactgaaacacgagattgataaagcttttgctcctaattgtttcgtttaccgctttggcggtgacgaattttcaattgtcatttttaatgctaatcctgaacaaatcatcgctgcactaaacaatgttgaacaatatttccgcgataattttatcaaacttcctgataataaaactaaaataaagttctcgttttcatgtggcttcacgaagcatttatctaatgaacatttttataacactcttgaacgcgcagatgatttagtttacaaagtaaaaaataatggccgcggaaaaatattgactgattaaaaaactaaggaaatgaataatgcttaatggatatttaattggcgggattatagtttggttatatgccctttcagtaactaatcgtgcacatttatttgctttttattattgggttggtgctattggtgcttttcttttaactacttttgcatgccacaaatattttgtctggttcctagctagcctagtgagccgcggagctggtgtgattggacagctgactcatagctttactgcttatccgtttccagctgctttagacattcaaactacttttggatcaattaccctattagttgactatgaatgttctggaattattgaaacattggcatatttaagcttattaattttctttcctatttacactcgtcgtcaaaaggttgctcttagcattatcggtgttttttggatctactttattaatatttgccgattaggtttaattgggataaccgttcattaccttaatttgcgaaccctgttctgggttcacgacgttataggacgtatctttttctatatctttacaattcttctatattatcaagtcttcactcattcacaattagtctcaaacttactagggcgaagcaaattagattaaaaaggaataatcatgtttgatcaaacagtattacaaatgggattctgggctacttggcttttaattcctgtcatatttgaagaaattccgatgataattaattttattcggcttcttcatcatcataaaattcgcaaaaaaacccctctgccagattttttgccagtattatcaattattattccgacttataattcatccaaaacactttatagatgccttaaatcgctagctgattcagattatcccaaaaatttactaggaattttcgttgtcgataatggcagcaaagatgacacctttcaagtctttgctaaagctcaaacggactatccacaattattgatgcggtggcttacttctcctcatggaaagtcttctgcattaaatgctgccatttataaagcaagatcccaatatatcattaatatcgatagtgacggtcggttggataaacatgctttaaacaacattgttaaaaaattctcggctaatccaaatatcgatgctttaactggaacaattttaaatgaatattttgaatattgccaaacctttctagcaggaagaaatattgaaaataacagcaatcatattttcacgctttctggtgccttttcggcttttaaacgcgagaccttaattagaacgtatctttacagtaccgatacaattagtgaagatactgacatgactttccaaatccggtacaatttaaagggaacgatttcattttgtgatgatgcaattttttattctgaaccaattagcggcttcagtgaactatatactcagcgacaacgctggcaacgcggtgaactagaagtcattaacaaatatttatcgcaagttttatcttggaaacaattcttcagtaattttcaaattcgtcgtttaatcattgatcacacagtcactttcctaaaaataatttggatgtttgctatttttatattattaggatttggctattcatggatatcattattgttttcttatgcggtaatttatcttttatatttatttttggagatttcgagttcaatttgtgtttacatatacttaggaagctttccagaagaaagaaaattttatcttaaaaatatttggatgatttttttactgcttttttataatttactttgttctttcattcgttgtgttgggattattaatgcttcaaccaccactacaacttggcaaggaattaatataattcaagaaggtcaacaggttaaccaaatcataaaaaaagatataagacaattattgaaaagaaaaaattatgacgactaaatatcatacttatatattcacaacttatttgaacgcatcacatgctattcgttggagtaaaggaatcgggcaggctcattcccatacttatgaaataaggtatagctttcatattaataacggcaaattgattcgtttcaatgaaattgaaaataagattgctgaaattataaaaaagtttaataatcaatttttaaatgaagttgagccattcaccaaagtaaatcctactttagaaaatttaaccgattatctattcaatcgtttcggcgaagaattaaataaattgaattgtagtttagatgaaatatctgtaagtgaatcaccaatgagaacttatcagatttcaattaggtaacagaggtaatagtaatgagtaagtggtataacgtttttcaacctatttatcaagtcgataaagatttaaatgtaacaatttcacattatgaaatgttattacgagatgaaaatgattccttcccaaataacgatttcttcagagtaattggaactgaagaagaaaatcaaaaatggattttagccgaaaaagagtcaatagatcaagcttttgctaagtaccctgatatctgtatcaatttaaacattgagcctattcaattcgcatacccaagcgtttggaaatttattgaaaatatttatagtaagtacgcgtggtgctagttaaatctttctagacaataagccaaattataagctaaaattgcaatttccaaccggctttgaaagcctatcagactacgtgctcgattgttctcggcattgtaataggtcagaagcgaaaagtcgctttcaattgttctgcgaatagccatcaattgatgatcattgtgctttttagctcctgtcatatttttacgatatggtgtccaaagttcataacccatttgttttagctgttgatgcagttctttgcctaaatagccttcgtcgccaagaagatagtaattagatggatgggcattttccagcagttcaactgtctccttggcatcatgaactgatgcttttgttacgacataatcaagaatgtaaccgtcatcgctaacaatggcatgaactttgaaaccatagaagtaaattttcttggtggccttataaccaatgttggcataaccgcgaaaaattttagcacgatagttgcgaattggttggcaaacaggtaccggaaagctgtcaatgatcaagaaatgtccattcaggtcaacctttttattcatttcttgccgtatctgataaatcaattgcaatagctgacgtgaacgccgattaaaacgtgagtgtgataaacaattgaaacattcacagaatcttctttgtgattcaattcctgtcttagcttgccagataagtaaagccaaaatcagactgtccgtagttttaatttgatcaatatttcgccgatgagtaaactcagccggtgcatacaaacgataccagtgccgacaaattatcactaaatctttaaaactaacttgtaaatggtggctaaaacgcttaagcttaagacagttcaatcagatcagactcttttctattattactatttacaagtcgagtctaacaagattggacttttttattaactaaaacgatttaactagcaccatgcgtatagtaagtatggtaaaaaagtggtcattgaagtaactgaacgtcaacttcaagctggaaccttaggtaataaacaatttgataaatctttccaaagattccatgatattggcttggacgttgttttagacgatgttgattctggtggtcatagctttacttttgtagatcaccattctgatataatcagtgggatcaaattatcattactagacttcgatcctattagttctgatactactattaaatttattgatgcttgggctagctttgctaaggaaaaacacttagatctagttgtagaagctatcagaaataaggaaattgctcaaaaatttgctggtaataaacatattttccagcaaggttattactggcaacagggagtaaaactagaagacttaccaacggtttatggatttaagaagtaattacaaaaagacagaattgattgcttaattctgtctttttttacatgtatttatttaaaaatttgtttattcgcattttatattcatgcggataagtttcgaatgaacgcgcatgagctgcacttttggcaatccataactccttaggaccatttgtagcatgatagttttgatacaccattttagttggcacaaaattatcttttccaccatggataaatagcattggcttagtattcttttttaattgcttaactgcagatgcatcccctaaataaaagccaagatttgctttacttacaccgcttaatagcgtaactgcacttgtagctactgcttgcggcataccgtataaatcttttgcttcatgcatgaattcagctttcacatcactatacccacagtcttcaatatatgccttaacttgcttaggcatcttgaggccactagtcatcattgttgttgctccgcccatactgacgccaaaaattacaatctgttgttttcttccttcaattgataaatctttattgacccattttctaacgtcatatttttcaggccaaccatagccaatatacttcccttgactttgtccatgagcacgcgcatcaggaatcaaaacattatatcccaattgatgaaacatcgccgcatagggtgccatggtatttttattattaccaaatccatgcagcaacacagcagtcttttcagaatgcttatttggaatataatttgcatctaagcggtagtttgaagaagcagacttaatataccaatgctcttttttagcgtttttataccactttttattctgcgcaagtgaatctttctttttcttgctagaatatttattcagcactgtcttttcacctggaacaaaagcaacattaaagaaatatgcttcaactgctccaattaaaacgattaaaactgtggcgactatccctattatccaccatacttttttgcgttttctattcaaaatgtcaactcctatataaaataatatagaattaattatacacttttgaattttatatggtatattgacattttaagtaaaatattgcctatacaaaaaatgatggcttacgccatcattttttgttattaatctaaatcttcaccgtgagattcaattaccttcttgtaccagtaaaatgaatccttaggcattctcttaagagtacctttaccttcatcatcacgatcaacatagataaaaccgtaacgcttagacatttgaccggtaccagctgatacttcatcaatacagccccaagtagtgtaggcacggacatcaacgccatcttcgatcgcacgattcattgccttaatgtgcattctaaggtaatcaatgcggtaatcgtcatgaatcttaccatcatcactaatcttatcaacggcacctagaccattttcaactaccatcattgggatttcgtaacggtcatacataacttcaaggtagtattgcaagccatctggatcagttgcccaaccccattctgaatacttaaggtatggattcttagcaccagcggcgaagttaccgccaaccttatcttttacttcatgagttgtgataacgttgctcatgtagtaagaaaaggtgtacatatcaactttaccttccaacatatccttcttatcttgctcagtaatgtctaagtgaacattgtgttctttccaaagacgcttagcaaatgttggatacttacccttgcattgtgcatccccacagtagaaaatattttgttcccacatatggcggttagtcaaaatatcctttggatctggggttaatgggtaatcaacgattccacaaatcatattccctaccacataatcaggatcaatttcatgagccaacttaactgcccgagcactagctacgaattgatagtgcaatttctgatatgcatgttggtatgccttatcatcagtcacattattgccaaaagcactaagcatcaacagggttgaattgatttcgttaaaagtaagccagtacttaactaatcccttgtattcttcaaacaaagtcttagcatatttcacatacatatcgatcattttacgatcttgccagtcatgatatttttcactgaggtaaagtggatcttcatagtgagaaatagtaactaaaggttcaatatcatattttttacattcttcaaatactctgcgataaaagtcaagtccagcttgatttggcttttcctcatcacccttagggaagatccgagtccaagcaattgataaacggaaggttttgaaacccatgtccgcaaacatcttaatatcatctttgtaatggtgataaaaatcaatcgctacatggttaggataatattcattaggatcaattgcaccaactgccccttcaggaagtcccgcacctggaactcctggtgttttttctaacttaccatttaacttgtaagtcaacattctaggtgcatctaagctacctgcagtagtaatatctgttactgataggcctttaccatcttcatcatatgcaccttcgatttggttagcggcagttgctccgccccataaaaagttctttggaaatgacattatgattctccttttctgaaagcatttacattaattatagactaattggtttgaacttgaccagttgttttaacttctgcgttactgccttgcaaagacaaaatttcttgaccaactttaacttcaccttgagctacttgctgtacagattcatatttcttagaattcgtaacaacaactggagtagtcacttcatagccagcagccttaatttctttaatattaaatttaaccaatggatcacctgctttaacctcttgacctttttctactaaagtcttgaagcccttaccttgcagattaacggtatccattccaatgtgcattaacacttctgcgccatctgtagtgttaagtccgacagcgtgtcctgttgggaaaactaaagcaatcttaccatcagctggggcatgaagcacaccttcgcttggttcaatagcaacgccttcccccattgcaccgcttgagaatacttcatctttaatttctgacaatggttttacttcaccgtctaatggtgaaactaatttggttgaaggattttccttttcttcacttaaaattgcttgtacaggagcactcttagtaatattagctgcttcattagcggcgtcagcaactttttgtgcttgttttttattatattcagcatcaactgattttttaccaaagagcatttgaagtgcaaaaccagctataaatgctacaataccggcaataattacgccgacaattgttgtcattgatcctcccttaggattaatgtaggccggaattgcaaagaatcccattgatggcataatgtacaatactgaatgaaaggcaccaatgattgcacctgagactgcaccagcaatacagcttaaaacaaatggcgtttttcttggtaatgtaataccataaattgctggttcagtaacaccgaacagtcctgagaaaaatgcaccagtagctgtttctttaagttttttgtccttagtttgacggataatagctaaaacaacaccaatttgcgcataacaaaccatgcaggataaacctagaattgggtcataacctaatgcggctaaatctgcagtagttacggcaacgattccccagtgaacaccgaaaataacaagtacttgccaaagagcacccattaataaaccagcaataattggactaaagttgtaaacacctgacatcactgcaccaattgcgtccccaacccaagtcattacaggaccaattactataaatgcaactggtaaagcaataatcatagtgacaactggaaccaagaacatttgcacaactgatggaatccactttttagcccagtgctcaataattgaagcaaaccaaacggtaaataatactggtaaaactgtagaagtataattcatcgtgataaccggaatgccaaagaaagtcgtgtgaatctctgaggcaaaagccgttcctttaaacaatgtacctagaacagtcttacttgcagctaattgaaccatagttggataagttaaggttgcaccaattgctaatccgataaattgattcatgtgaaatctacgtgctgcagttacccctaagaatactggtaagaagtagaaaatactatcaccaattgcatatagaatttggtaagtacccgatttagtagaaagccatcccattgcgcctactaaaactactaggcctttaataataccgccagcactaagtggagctagaatatctgtaaaaatgcctgaaatcaaagcaacggctttatccacaaagctagaattatcttcaacgtcatcatcaggaacttgtccaccgccattaaagccgccttctttgacaacagcatcgtaaacatcagcaacttcattaccaatgaccacttgatactgaccaccagctttaacaacagttacaacaccatctgtatcttttaaaacatcatcgttagcctttttttcatcctttaatttaaaacgcaaacgagttgcacagtgaacaacactggtcacattatctttgccaccaacattttgaatgatggtcttggctaattcatcatagttcttagccatttgcctttcctccttaaaataaaaacccaagctactcaaaaactaaagaacataaatgttcaacgtctttcagtaactcgggttcatgcctaatcttcttagtaacatacctaagtaacttagatatttaattatcttgacgactagttacgcgccaaatatgtaaaacaagataaaattcatcatctgaatctaaatcccatcccatttttgcatgtaagtaagtggtgatccgctccgccgtctcatacgctttgctatatttgattttcataaaacctagcattgcaggatcaagtgaagcctcctccttttgcttatttcgtaaaaatctaactaacaaaatgcgcaaatgcgaaacaaacctactatagttaaaggagctcgtatcaagttgcattgaatattgcaattgaataatatcgattatcccacgaatcaaatttgtaatctgaattgtttcttgtacttgagaaacatcactcttagcattaaccaggtgataggtcatcaaaaccgactcactctgcggcaatttaatctgcatctcctgattaattagattgaccacttttttagctgccgcaaattcttttggaaaaagattttgaacttcccaactattgttagcgggagctatatcaatatgatctttaattcgcgtaactgcaaaatcaatgtgatctgctaaagcaagatactgaaagtcattgaacttaatctgaagcagaggttcgaccagctgaagtaccttattagttacttcaattgttttagggtcaaagcccttaacttgatccacttcgtctttagtaacgaagcgacgttcaattttgctttcatcaacaggatcacttttttttagaccaaatcctacgcccttgcctaggactatttcttcttgaccttggttattttcaattaaggcagcactattattaaatgttttaagaaatttcataataattcaccaccttagcaaaaaaagaaaaagctatcacaaataatgatataccaacgcaacattatttgtaatagctaagacctgatcgtatcagtaatccgctcacttacagttattataatagccaacattgtaagcggtgtcaatataattttgtgaaaaaatgcaaaatattttacaatgaactaaaaagcgaggtaattaaaatgaaattcgttcttgcacctgattcatttaaagaaagcatgacagcaaaagaagtctgcattgcaatgaaaaatggtattcaaaaagttattcccaatgcacaaataaccgcagtaccaatggctgatggcggcgaaggtacaactgattcattggttgacgctacaggcgggcaaaaataccaaataaatgttaccggtccgcttaatcaaaaagtatcagcttattatggcatctcaggtgatggacaaactgcaatcatcgaaatggcacaagctagtggtctctcttatgttgcaaaaagtaaacgaactcccgaaacaattttaaagactacaacttatggaaccggcgaattaattaacgcagctttgaagcaccacgttaaaaagattatcatcggcctgggcggaagcagcacaaatgatggcggtgctggtatggcacaagcacttggtgttaaattttttgatcaaaatcatcatgaaatcacccaaaagctagcaggcggtgctttagatcaaattgtcaatattgatctttcttcaattaatcctcgtattaaagatacccaatttttattagccagtgacgtaaccaatcctctaactggacctaatggtgcaagtagcgtcttcggcccacaaaaaggcgcagatgatacaactgttaaaattctagatcaaaatttatctcactatgcacaagtaattgagcagactattgataaaaacgtcgcccaaatttctggtagtggtgctgctggcggcctaggcgctggcctgatcgcctttactaacgccagtattcatccaggcgtgcaattaattgcccaagaaactaagcttgaagccaagatcaaagacgctgactatgtttttaccggcgaaggcggaactgattttcaaactaagtttggtaaaacaccctttggtgttgctaaaattgctaaaaaatatcacattcctgttatttctttagcaggctatttagatcaaggtattgatcaactctatgatgaaggatttaccgctatatttggcattcttgctaaagcagaagatattgagcaagccctaaaagatggaccaataaatgttacccgtacaactgaaaatattgttcgtttaatcgcacaaaaataagatgagctcgatgcccatcttattttatttcgttaatttcttaattaagccttcacagccacgataaatttcattatacgctgtttcaaaatcatttgtataccaaggatcatcgacatcagcataagagccagcaaactctaaaattttatgttctttatgctctgggtctccaccagtaatgcgattcatatctgcgaaattttcttcatccatgcagattaaatattcataattatcatagtctgagcgagtcatttgactagcacgatgaccacgatcatatggaatatgttttgcaactaattcccgttgtgcacgagcatcaatcccatgacctaaagcatcctgcgtagttgctttagattcagcagtatattgatctgctaggttattttcttttaacaaatattgcatcacggcctctgccattggtgagcggcaaatattgccatgacaaacaaacagaatttttttcattaccttttcttcctcttagttagtctatttataaccggccaaataatcgccgtaataactccaactgttaagccaacccaaatctcctgcgacaaagttacaagaatgccactataaactcgactttgcaatgcggtcatcgcctcatttgaggcaagccacaatgccacaaatgaagcaatagtagctagtgctagtggaattgacgccgaagagcgaccaaataaaatcaaaattgcggctaacaaaaataacaaagccactgcaaaaattgaatactcataaattgtaataatatggttcacatcttctgaatcttccttcaatttatgattaatttgcttgactaaatattcattgataatttcttccaacttacttttactagttaagcctaaatctttagtggtcaattttccctgatcattatatttttcacacaatctatatagatcagcatatgataagttaacttgatatttcggcggcaattgttctaacaatgtcttttccaaaccagatgcttcgagtaactcaacccctgccttcaaattaggattatctgagtcatccactactcgattgattacttctttgcccatcgcctgtgtatcgtttatttttaaattcacattgctagtcattaataaccaaaaagatactgcggctaggccgaccattatcaaacgtagtattattttgacgatgttcttcatctaaaaatcttcccctaacatctacttttttcagatggcaaacaattgcaaggcaccatgtcaggagcatccttttctttcaatttaagttcttgctgcatcgtcttaatatcgcccttagaaagcggtgcttcttttagcaactgaattaatacctcacccttgtgcatatcacacatgttttgcatcatatgtaaagtaacttcagacatcattttgcgctgactaatagtcggcttataaacaaaacaccggccttctttacgcgtctttagcaagcccttttgcactaaacgccgcattagcgttttaattgtggaatcggaccaatcctttttaccttgtagttctttgattacttggccagtacgaacttctcctaaggtccaaataatacgcataacttcccattctgattgggtaatggaattacgatcgtctttagtttctgccataaaacatcacttctaaatccaaattttttactaaagaacaaattttttcaaagcctttgcaatcccgttgtgatcattatcatcagtaacataatcagccttatctttgatctcactaatggcgttacccatcgctactttcatgaagttgggattagaaaacatcgaaagatcattgccttgatcaccaaaaatcatcacgtctttttgggcaatttttagccgtgaagccaaatccattaaagcattaccttttgaagctcccaaggcatttaattcaataatactgtcaaaactgcgaacaatgtcataagtctgaaaagcccagtcggggaaactattccacagtttttctacctggtcagctccttcagttgaagtaaaaccgactttgttaaaagtaaaatcttttggaatttcttttcggtctctaactttcataatattatcggtcaaagccgcattaatttgcatttgcacagataaatcccgatcagttgtaatgaaatacttagtcgtctcaaaatgtacatttacatgacttaaacgctgaaaacgcaacatattattgaagtcttgataattcaattcctgactcattaaaacacgaccagaaattgtttgaattactgcaccattaaagacgattgcatattgatcatcaccttcaattcctaattgcttagcaaagttcaatactcctgataatggtcgtccagtagctaaaacaaccttaatcccattttgtactgcgacacgcaacattctttgcgtttctggcaaaatagtattattgcttgataataaagttccatctaaatcaaccgcgatcaatttaatagccattttaatccctcggatcttaaaaattacatctagcattaattatacaaaaagccgtgatttaactcacgactttttacttatcgattattcaattaggattttacttacccatttccttttcgaccactttaacgatacggtctacataggcatcagtttcttcttgagttggtccttcagccattactctaagcaagtcttgagtacctgatggacgaacaagtacacgaccatttccagccatatccttttccactgcagcaatttcatcaagaattggttggtgttctttccagctcttcttgtcagcaaccggaacattaactaggcattgtgggtaatctttaaagtctttcaaaagttcacttaatgacttaccagtcttcttcattacgagcattaaatgcaaaccggttaacataccatcaccagtattatgataatcactcataataacgtgacctgattgttcgccacctagattgtagccgtgagcacgcatttcttcagaaacgtaacggtcaccaacttgggtacgaacattcttcaagccttctttttcaagagccttagtaaaaccaagattactcattacagtagtaacaatggtatctttcttcaaacgaccatgttctgcaaagtatgagccgagtacgtacatgatgtggtcaccatcaacttcattaccattttcatcaacagcaatgcaacggtcagcatccccatcaaaggctaaaccaagttgagcaccttgcttaacaacttcttcttgtaacttttcagtatgcgttgcaccaacatgatcgttaatgttcaaaccatctgggtgagttgcaatagtagtaaagtcaacgccacaatcagcaaacagtcttgagatcaatgcgcttgaagcaccgttagctccatcaataactaccttaattccacccaagtcttctggaatagtattttcaataaattgcaagtatttagctgaaccttcgtggaagtcagttacagtacctaatcccttagcagatggacgaggtaatttatcttccttagcgtcaattaatttttcaatttcgccttccatttcatctgaaagcttcaaaccatcgctaccaaagaacttaatcccattatcttctacagggttgtgtgaagctgaaatttgcacccctgcatcggcgccttgtgctcgtactaagtatgaaagacctggagtagtaattacgccaacctcaagcacttcaatcccaactgaaagaaggcctgaaatcaaggcatattcaagcatttggcctgaaatacgagtatcacgagatactaataccttagcttgttcgccgtcttttttgttcttagttaaaacataaccaccatcacgacctaatttaaaagccatttctggagttaagccttgattagctacgccacgaacaccatcagttccgaaatattttaacatttaataaacaacctttctcaaattaattattcgcattctttactttaattgatatctgtacattttcaggatcaacgcgagcaactcccttaggtaaaactaaagggtaattctttacagttgaatatgagattcctttcagatctacatcaacatccaactgcttaatctttgctaatgtttccttttgtccatacagtgttacctcatcattcttggcagtaaccgaatagactttattatttttttcatttttaggctttaaatttagcttaactttctttttgaaaagcgatattggcaaactagcttttactgtagatggattaatcactgcatttaattgacgcccttttttatcttcagctatcaaaataacttgacgctcataatcatgattaatgccattaggtaaaggcaacttggcaacgatctgatcaatctgatttacttcgcttctagcaccagtaacctcaacttgctgcggatcaacactagccgtaccaatattatatccattagcaacagcatttttattatactctatttgaacgggcatggtacgagattttcgccgttcaatatcaacattaactgttgccgggttaatcgtgtaagataattgactatttagtcccgtaacttctacctttacggtttgcttacctattttcttatgagttagatcaatataagcacggaagctttgagtattaacagtcgaagtaaccaacgcattcgaaccctccaaagttatcttaaccttttcaggataaccaacaacatagtatttatctgtattaaccgaaacttgcagaggaacactaattgtctgcgtttcattagcagtttgccgtgtcttcttagattcaccctgtgtaacaaaacctgtttgagtagagtcaatgtaaaccactaataagatcgcaaacagcaatgagattattctgattacccagcgtttatcccaaaagtctttcatcgatctgcaccccatttccagactttattaatcacacgacgaatccatggaaccttcttctcttccttaggaacaagttgagcattcaaatacttcaaatattcttcacgagacaaatctactaaaaagcgcccgtttctagtaatagttacgccaccagtttcctctgagacgacgatcgttaccgcatcggtaacttcagaaataccaacggcagctctgtgacgcgtgcctaaacgcttaggaatcatgctgttatctgacagtggtaaatatgctgctgcaacagcaattcgattattattgataattaccgcaccatcgtgcaacggcgtattagggataaaaatattaattaataattcaccagaaatatccgcatccagcttgattccagtttcaatataatcatctagccccgtatcttgttgaatcgtgattaaggcaccaattcttcttttagacatgtattgaatcgctttatcgagctcctgcaccatcttaaccgactgtgtatgagcactctcacctcggccattaaaaatcggcgtgcgtcctagccgctctagtccacgacgaatttccggctggaaaataacgataattccgattactgcccaagaaacaatttggtccacaatataagttaccgcatgcagttgcagtaagccggcaataattctaacaataaagataaagacgatcccttttgccagttgtactgctttggtaccacgaatcatcatgatcaaacggtaaactaaataccaaatgattaaaatatctaaagcaatggagaaattattccaagtaaacagattagaaatattaaaatgcattgattgctcctttcttctttaattataaccgccccaatttaccgtgcatacattttaaattctaaaaataggtcattatattcttgggtcttcttaggacctaaatctctaaagacctgtagattcttcaacgtactttgagtaggataaaactgccggtcatctctaacttttttcggcaataatttttgggctgcggtatttggggttgcatatccaacatattccgcattttgcgctgcatttttaggttcaagcataaaattaataaacttaagtgcagcttttttattttgtacagttttaggaataacaaaattatcaaaccacaaatttgatccttgcttaggcacaacataatgcaagtgaggattttgttccatcatttcataagcctcaccagaccaggtaacgccaattgctgcctcattttgcactaggtacatcttcatttcatctgaaataatcgccttaatattgggtcccagactattaagcttagtttgtgccaaatgtagtttaatactagatgtggtattcattgaatatcctaaagaaaccaatgccatccccattgcatccctagctgaatcaactagtaaaatttgcctgcgatactttttactccacaggtcattccaagtcttaattgcccctggcttgacgaatttatcattataaacaattcctagtgtcccccagaaatatggcacagaataatcattattttgatcaaatgacttatgtaaaaaactcttgccaatatatttcaaattaggaatttgcttttgatccaactgatcaagcaaatgagccttgcgcattttagttaccatatactcagaaggaatggtcaaatcatatgccgttccgccttgtttgattttggtatacatcgcttcattggaatcaaaggtctcatagacaacatgataacctgtctgcttttcaaacttttttattaactttggatctagatagtcgccccagttatagataatcaagttttgtttatttttcccggtagacgatttctccaaatgatgggataaaccccaaaggcctgcacaggcaattaaaatagctgcaattgccatcataatctttttcatttaactaggcctcccatcacacgatgatttttctttctgccctttttagtagtaataaaataatagattcctacaagcaacaagacaaaaatgaacattacggtacttaaagcattaatctcaagatcgattccttgtcgtgcccgagaataaatttcaactgaaagagttgaaaaaccattcccagtaacgaaaaaagttacggcaaaatcatctagtgaataggtcaacgccataaataaaccggaaaagatgcctggcataataactggaattaaaacatcactaaaaacctgccatgaattcgcccctaaatcacgtgctgcatcaataagcgacatatccatttcattaagtcgcggcaagaccatcaaaaccacaatcggaatagaaaaggcaatatgacttaacaatacagaaccaaaatttaagccaattcccaatgctgtaaaaaagatcaaaaaactagcaccaataattacatcaggtgacaccatcaagacattgtttaatgctaaggttgttttcttattagattcttttttcatcgcagcaattgcaattgcaccaaatgtcccaataattgttgctattaaactggacaacagcgctagtaggatagtttccaaaaatatcgctaataagcgattatcttgaaataaagtctgataatgagcccatgtaaagtgctcaaatttattcatgtttttaccactagaaaatgaaaagtaaatcaaataaaaaatgggtacatataataggatcaaagtaaaagcaagatagatcttagcgattaaatgtctgtttctcataaatctaccttctttcttctagcctttttgctagtaatcaacatgactaccaccatcagcgcgattaaaattactccaattgtggcccccatattccagttcattgtggtcataaaatactcttcgatagcagtccctaatgtgattacccgattgccgccgatcagccttgttaacataaataatgacaatgatgggataaagatggcctgaacgccgctttcaactcctggacgagaaagcggccataaaacatagcgaaaagtttgccatttactagcacccaaatcctcagaggcatgaatgactgcaggattaatctctttaatcgcattaaaaattggcaaaatcataaacggaatttcaatgtaagtcgccacaaaaataaaagcaaaatcagtaaacaaaatatttacgggaccaataccaaataaatgtaaaaatttatttactaaaccgtcattacctaaaatgccaataaatgcatatgctttaagcagcaaattaatccatgttggcaaaatgatcaataacagccacagctgctggtttttcattttaattaaaaaatacgctgccggatacgaaattaccaacgtcaacaaggtgatcaaaaatgcataccaaaatgagttaagcatcatttttaaaaaggtaccatttttaaaaaattcaacgtaatttctgagcgtgaatgcgttattactatcagtaaacgaataccagagaatcaataaaatcggcaaaatgacaaagagaataatccacagcagatatggaatcataaaaaacatctttttatttttcattttcatccgcctcatacttttctagtcgagcatcaaaatcgtgttggctttcatttaaccgcatgacgtgaatatcttctggatcaaaaaagagcccaacacgttgtcccaatttaactccattagtagaatggatcagccattcattttcattggcatcaattgccttaatctcaaagtgatcacctaaaaataattgcgtctgtgctgtaaccacaatcttcccatcttctggtttaacaatatccaagtcttcgggacgaataactacttcaaccttttcattaggcttcatcccaccatcggcacatttaaatttattattagcaaattccacttcgtaatcatgaatcattcgaccagataaaatattggagtcaccaataaaacgtgctacaaagtcattcactggctcatcgtaaattgctaccggattaccactttgttgaatctgcccatcatttaaaacaaaaatttcatcactcattgatagagcttcttcttgatcgtgcgtaacaaaaataaaggtaatgcctagctttttctgaattgcccgtaattcaaattgcatgtcttttcgtaaacgtttatccaaagcagatagcgactcatctaatagtaaaaccttaggttcattaacaattgcccgggcaatagctacacgctgctgctgtcctccactaagttccgaaatttcgcggttagcgtaaccgtctagacgaaccatatgcaaagcatctttaacagctggcttgatttcactcattggtcttttcttaattttcaagccaaacgccacattttgaaaaacatccaggtgtggaaacaaagcataattttgaaaaactgtattgatatgtctttttgaagcatcaaggtcagtaatatcattaccatcaaagaggacttgaccactagatggctgagtaaagccagcaataattcgcaaaattgtcgattttcccgagccactaggaccaagtagtgaataaaatttaccagattcaatagttaaatttatatcttttaatgctacaaacccatcatcatattttttggtgatgtgttttagtttgataatatccatttccatccctcacataaaaaacagctgcaagccttccagcctgtagcttgtctttgctaaaatattttacttttctttgccgataatcctaacttctgtgcgtaagtcaatgtcaaacttttctttaattaccttttggatcaaatgaattaaattcaaataatctgttgcagtagcaccgcctttattcacgataaaacctgcatgtttcattgaatcttgagcgccaccgatttgtttaccttgtaaaccagctttaataatcatcggaccaacaaagtgcccagtaggccgcttaaagacactgccacaagatggatattcaagtggctgcttataacgacgtaaagcatttaaataatgcatatgatctaagatctctaacttatcgcctgacttgagtgcaaaagtggcgcttaatacaatatcgccattttcttgaactaatgaatgccggtaagaaaagttcatttctgcgtttgaatatgttttaaattctcctgctctggttaaaacattaacgctttgcactacttcttgcatctcaccgccataggcaccagcattcataaaaataccaccgccaatactaccaggaattccagcagcaaattccattccgctcaaaccatgatgagcagccgcaaaagctgtatcgataatccgtgcaccagcatcagctgtaacttgattatcttctactttaatctcttttaattcagtcaaaataattactaacccatcaattccgccgtcacggatgattaaatttgaggcattgccaataattgttaatggaatttcattttcacgtgtgacttttactaattgttctacttcatcagtcgtcttaggaaaggccaaatattcagctggtccacctgtcttagtaaaagtatatctgcttaatgggatttgctctttaatatcaatccctttttctttcaaatcaagtaattccacgctgttgcctccttaaagtttcttgttttattttaccgcataaaggcgttagcttcattaatattaatgatatacttttttaaaaggagaattttatgaattttattgcaatggactttgaaacagccaaccattatccagaaagtgcctgttcacttgctttggtaatggtgagaaataataaaattgttgatcgcttttatacagtaattaatcctcaaatgccatttgacgcgcgaaatattcaagtacatcaaattacagctgaggacgttaaaaacgctccaacaatggcagaggtctggccccacattaaagaattgtatcaaccaggaatgcttgtagccgcacataacgctcgctttgatactaatgtcatgcggcaaagcctggcacgttacggtattgaggagccccactatttggtcattgacactttagctagcagtaaattactcgaaccagaactgcctgaccacaaattagacacagtttctgaggccttaaacgttgaattgtggcaccaccataacgcattaagtgatagtgaagcatgtgctgggattttaatcaagcaagaagagcaatttggtgatgaagcaatcaaaaatttggtttatcagatatgaaaaatctctaggaattttgatcctagagatttttgctttacttattaaattcagttaacgcagctttgacccattcttcattgcgcttaccatgaggagtaaattcaacaacccgtttagttgaatcccaactatcgtccactctggtaatcgtaagttgcaaatactcatctggcaaatcattcattactagttgtggccattcaattaccactaaacctggttctgctaaatagccctccaaatcaatcgaggataaatcatcattttccaaacgataaaagtccatatgaaagagcggcaacttagcttctcgatattcacgcacaatggtgaatgtaggactcttaacaggccgatgtatgcctaatgctcgccctaatccttgagtcatggttgtcttgcctgcacccaaatcaccatttaatagtaataaatcgtagggctgggccgttttggctagggatgcacctaatttctgcattccatcagcagaattaatttctaactttgtcattacttttcatcctttgctaaagcttgtgcggcagtaacaattgctaaatcataaatatcttgttcactgcagcctcgagataggtcattcactggagctgctaaaccttgcaaaattggaccaacagcagtgaagccacctaatctttgaaccatcttataaccgatattgcctgattgtaattctgggaaaacaaagacattcgcatgtccagctacctttgagtttggagccttcttttcactaactgcaggtacaaaagcggcatcaaattgcaattcaccatcagctggaatttctggatgatccttttggaacatagctgctgcatcatgtaccttatcaaccattggtccttcggctgaacccttagttgaaaagctcaaaaatgcgaccttaggatcaatttcggccatcttggcagtcagagcagattgatagccaatttcagctaaagtttcttcatcaggattaatgttgatggcacagtcggcaaaaatgtaacgctcatcgcccttttccattacgaaagcgccggatactcgatgcatccccttagctgcatgaattaattgtaaagctggcaaaacagtgttagccgttgagtgagcagcaccggaaaccataccgtctgcttttcccatcttcaccaacatggtaccaaagtaattaccttgggctaacttgagctttgcttcagcaatactggtatcttttcgtctagctttaacaaattccgctgccatttgatcaagttcatcataatgattgaggtcatagatcttaacaccagctaagtctaaattattttctttaactaacttagcaatctcatctggatttccaattaaaattggttcgataatgccatcttttttcaaattagctatggcagtaagaattcttaaatcatcgccttctggaaaaacaattcttttcttatcttttgctgcttcaacttgttttttgaataatgaaaatacgctcattttttacctcttatgctaaatcagatttacttatcgtttctggcaattgccagtcaatcggcgtttcatcaaagttcttcaatgccatattacaccgcgaaaacggtcgcgagccaaagaaccctcgatcagccgaaaatggacttggatgtgatgatttaatgataaaattcttactttgatcaattaatggaatcttgttttgagcaaatcgaccccacaaaataaagacgacttttccacgctcactcagagccttaattgcagtatcagtcacatcttcccaacctttgccttggtgaccgttagcatgcccatacggtaccgtcaaaaccgcattcagcaaaagcacaccttgatcggcccacttttttaagtaaccgtgattaacaggccgagctccgacatcatcatagagttccttatagatatttttaagtgatggcggcaaagttgtacctggcatgacggaaaaactcattccattagcttgaccaggattatgatatggatcttgacccaaaattaccactttagttttagcaaacggtgttaatttaaaagccgtaaaaatatgatacatatcaggataaatttgtttagtagaatattcttcttttaaaaaattatgcaattcgtgatatttctcacttgcaaaaacaggatccaatacttgatcccaatcgttgccaattaattctttagccaagtcttacaccctcttttcttctcctctttatggtatcattaatttaatactaaatgggagagaaattatgatcaaattagttgcttgtgatcttgacggcacgttgtttaattcagagatggctgtttctgctgctaatgcaaaagctgtgaaaaatgcacaaagtagcggcattgaatttttaattgcgactggccgggccccacgcgaatcacgttcagttctcaaagatgctgatttgcataccagttttatcaatcttaatggtgccctggtttttgacgaaaatgagcaattaatgatcaaacacagtattcccaaggcaaaagcacaacagctagtgcatttactacatcgatcaggcttttactttgaaattttaactgccaatcaggtttatagtgaaaatctagatcaacgtatttcaaatgtagctcatttaatggtagatctaaatcctctacttgattttcgtcaagctgtagcaatttctgctggtaataagactattatgaatatgaaacaaatccacagtttcgataatttattgcaagatcctaaaatagaagtaatgaaaattattgcttttgactctcggggacatgaagcttttaccgatatcaaaaaagaaatcgctacaatgggcgatctagtagtaacttcaagttcatcttctaatattgaaatcaatgagcaacatgctcaaaaaggtcttgccttacttgattatgccaagttaaaaggtatcgagcctgaggaaatcgctgcaatcggtgataatttaaatgatgagagtatgatccgagcagcaggtactggcgttgcgatgggtaatgcgattccagctattaagaaaatagctcaggtagtcaccaagcgaaacaatgaagatggagtagcttatattttaaataaatttattgcagataataacaatatttaaagttatgaggtgagtaagtatgcgattttggctagaacttaatcaggaaaaggattacggtcaaattcctgtgcttaatcaaaatggaaaagctgaattttttattcaaggcaatcttgataatccaaaccacactttatatctaaataatttccgtaaacaggaagtgggacgtctgttttctgatggtgcgggcctaattgcttcgttcacaattgatgtcgtcaaccactctttagtaggcgtaaaaaagttaaacacacctattgcaaacatattctatttgacccaattaaagtatattgttacaggtagtattaaacgtggtacttatacttttcgttctggaatcaagagtgtagcaagtgtccaaacaatcatgggagatcgcggaggcgttttaatttgtgatattactaagcctgaagacgtcccctttattcttttgacatccgttctatttacacaatggcatgttacgcctttgaaactgcctagttttccgccaattggatttgaggtaaatccaaattaaacaaaaaagcagtcatgaaaattttcataactgctcttctagaaagtgatatagatatagatgtatcttctgccataaagtttatatttattaagtaataaggaattattaggcagagactgaataatgaaagttaaatctaatttgattcaacctccatagcttattatacttcgttcagccaaaaatacaagggctagatgttattattttactttaaagatagctaaataatgcatttagagctagcttatagcttaataatttgttatttaacttagtacatctatttttctaaacaagacaactttaatttctacgtaaattgcaataataaattgaacacttttaatcaagctgcttgatagattagatctaattctctttcaaagatttcatctggtgtatgatatgccaatatctttcttggtaaagagttgcaccaggtttcaatgtctatgatgtcttgtagtgaataattgtctattgcctctcccttaggaataaatctgcgaatgagtccattatgtctttcaacggttcccttgtcacaagatgtataaggatgagcatagtaaactaaagtatttgatacgtcttctaagcttgaaagatctgcaaactctgagccattatcagtggtaatggttttaaaaatatcattccaatgttcgctgtattgcctttggagttctttaaaggcctgcatgacactgacagaagtcttgtcaggaatacgaagaattaagaactcacgactcatacgttcagataaggttagcagcacctcatcatctttgctcttatgtccgagaactaaatcgcattcccaatggccaaactcattacgtttattgatttctttaggacgttcttcaatgcttctgccaagttttttcttatttctgcgaatacgatgaagcttggtattgcgtttaagcttctctggcaagtcgtaattatgtatatctaatagaccttggtcgacataattgtaaagagtcttagtacagacaacatctctgctgctaaatgcgccaacagcggtggcgcgattactgcacacatcaagcgaccagccgtctttaaagaaatgtttgtggacatagcgcatgaattgagttttcctgagaaagtctgatttacgtccacaatttttacgatgagcttgatatgcatcatgcccttgagtagccttatatcttttgactttgccatgatacagttctacagtaccgcgcttaacctcataactgatagtagaaggggaacagtttaattcacgggcaatggcacgcaaagaatagccatctttcaaacgcaattgaataataactctttcctcgaatgataaatgcttgcctttaatgtgatgattcatggtagaatgtaaagagtccattttgacctcgtttctaaatgttgtgtggtaactacattctatcaaacaggtccgaatggactttttattttttattaagtgttcaatttaattttacaatcagcgactttaatttctattaaaaaatatagtgaaatgatcaagtgatttatcaatggcttgatcatttttatttactttatcaacgaacttgtttttagctatcaaactatataaaaaagagccaaatctaatgatttgaccctaaaaattctagattattaatctaaattattttttatgaattagtcttggtagtttaccaattctaagaatgattctggtactaatgaagcaccaccaaccaagccaccgtcaatatcaggcttagccattaattccttaacgttagctggttttacagaaccaccgtattgaatacgaacgttttctgcagtttcttcgttgtacaagtccttaacagtttcacgaatagtcttgcacatttcttcagcttgatctgatgaagcagtcttaccagtaccgatagcccagattggttcgtaggcaataacaagtgaagatacttgttcagcagttaagccgtctaaagcagccttaatttgagcaactacccagtcttcttgcttgttagcttcacgagtttcaagtgattcaccacagcaaatgattggcttcaagccattagcaaagattgccttagccttcttgttaatgtcttcgtcagtttcgtggaagtaaccacgacgttctgagtgaccaataattacgtagtccatacccatttctttcaagaccttaggtgaagtttcaccagtgtaagcaccttcgtcttcaaagtaacagttttctgcaccgatatgtaagtttgagccttcagcagcttttctcaaagcgtcaaggtcaactgcaggtgcacaaataagtgattcaaccttacttgggtctggtaacttatccttaacagcgttaacgaattcagtagtttgttctggattcatatgtaacttccagttaccagcaataattggtgtacgactcattaatctattgtcctttccttactattacttgtctgaaacgcaagcgatacctggcaattccttaccttcaaggtagttaagtgaagcaccaccaccggtagaaatgtgggtaatcttaggagcaatgcctaattgcttagcagcagcagttgagtcaccaccaccgatgatagtagttgcatccttaaggtctgccaatgcacgaccaacttccaaagtaccttcagcgaagttaggcatttcgaatgcacccattgggccgttccaaacaacagtcttagcatccttcaagatttccttgaacttttcaacagtcttaggaccgatgtcaagacccatcatgttgtcaggaatatcatcaccaacaacttcacgtgaagcatcatttgagaattcagttgcggctacgttatctacaggaagaacgatcttgtcgccagccttagcaagtaattccttagcaaggtctaccttgtcagcttcaaataatgatttaccaatgctgtggccttgagctgctaagaatgtgtaagccataccaccaccgattaaaatatggtctgacttaggaattaagttttcgataacaccaatcttgtctgaaaccttagcaccaccaagaatagttacgaatgggtgtactgggttttcaacagcatcacctaagaacttgatttccttttcaagcaagtaaccagctgctgcaggcttgccagcttccttcatagcagttgcgataccaacgtttgaagcgtgacttctgtgagcagtaccaaatgcatcatttacaaacatgtcgccaagacttgcccagtattcgccaagcttaggatcgttacctgattcacgcttaccaaagtcgttgtcgatgtcttggaatctagtgttttcaagaacgataacatctccatccttcatgttgttgatagcgtcttcaacttctttaccttcgtttgatggtacaaaagttacaggcttcttaagaagttcacttaaacgttcagcaactggctttaatgataattccttcttgtcagcatctgacttaacacgacctaagtggctaagtaagatagccttgccaccgtgttcaatgatgtacttaatagttggaagtgcagcaacgatacggttgtcgtcaccaataacgccatccttaattggaacgttaaagtctacacgtactaagacctttttgcctttaacatcaagatcgtcaacgattaatttagccattataatcctccgattattttgatattttttcttcaaaaaaaggcggaaggaagaatctccctccgccttctcaattaccacttaactatataatcagttaattaaaattaatgattaaagagttgcaaagtgtaataaagtacgtaccatttggcaagtgaatgagtattcgttgtcgtaccaagcaacagtcttaactaattgcttgtcacctgcagtggttaccatagtttgagttgggtcaaagattgaaccagcagtcatgttaagaacatcgctagaaacaatgtggtcaccgttgtaagcaaatgatgggctttcgtacttcttcatagcttcgttaacttcgtcagcagtaaccttcttgctcaagattgataccaattcagtttctgaaccatctggaactggaacacgttgtgcgtgaccgttcatcttaccgttcaagttaggcaataccaagccgatagccttagctgaaccagtagtatgaggaatgatgttttcagcagcagcacgagcgtcttgttccttaccactacgtgaaggaccatccaaagtcatttgagtaccagtgtatgcgtggatagtagtcatagtagcaacttcgataccgaattccttgtccaaagcgttagccattggtgcaagtgagttagtagtacatgaagcagctgaaacaatcttgtcatcagcagtcaaagtgtcttcgtttactgagtaaacgatagtcttcaagtcgttaccagctggagctgagatcaatacacgcttagcacctgcatcgatgtgagcttgtgacttagccttgctagtgtagaaaccagtacattcaagaacgaagtcaacaccatcgttcttaacccatggaatgttttgtgcttgtggttctgcgtatacgtggtaactcttaccgtcaactacgattgaatcttcagttgatgaaacttcgtggttgaaagtaccatgagtagtgtcgtacttaagcaagtaagcaagcattgctggagtagtcaagtcgttgatagcaacaacttcaatgtcctttgacttttcgccaaggtccataatacgacggaatgctaaacgaccgatacggccgaaaccgttaataccaattttaactgtcataacctaaagtcctccttaagaactataaacaacatttattttaaacgggatttcatttcccctttaaaatcatatttgaggcgccctcatcagtgattagccaggtttgatgaggcgcattaggcatataagctttaattgcttgagcctttcgggcaccacaagcaaaagcaaatatgtggggtattttgtataggttctcgaactgcaatccaacctgggtgatgcggtcaacaaccttgccatgttcatcgaagaaacacccgaaacattcggtgacggctctcttctcacgaagttcagatagcttaattgaattatagcctctgcgctgtgccatttcttgagctaacccaataccatgaatcacagcatcactttgagaaatgtcttgcagaacatctgcgatcgaggactcacgaatcaaagatttgtaagcatcatctgaaacctgctcaggtaaatataatgtcttataagtacctgaagtcttagcagccatttcttggacgattgtattactttgcgtctctacattttcgcccaaagctcctcgacctggaacaaattccaactggcgattgttagctaaatctggtgataaatacttagcagatctagctaacgccgctccacctagaattgtaactattgaatggcctaaaggcaagagtaaattcaaagctgaacttaatttttctcccatctcctcatatactcggtcttggaaatccgcattaccagggacgatcaatgttctttcaatccctaattttttggctaatgctacttccgtttcaccggcattaaagaggcgatcaagcaatggtcctgcatcttttaatgttttctcacccttttcagttaaaaacatcccaaaactttttgtttcaatcaatcctaattgacataagtactcagtctcagttctgatgtttctctctgaaagccctaaatgctgagcaacactccgacgtccaattggcgcatgtagcgaaatctgctcaaggacaagatacctttgtcgaagaatctttaagacgtcgggaacgagcgcttcgagcaaagaaaagtccgaatccatcgttccctcctttccatgggacatctatcgaccacctacgtgtcgttttgtgtcccagaatgcttaaaaatataagagaaacgtacttttcattcaattcatacatttcccaatcgacactgttagtataacaatgtatttttcgtaattcaagaaaaagatacacgattttaaaaaagtcgtaaatcgagtaaaatcatttttatttcattactttttttgatatactaccacttgtgaatcatctgggcccttagtgtaatggatcgcacataagattccggttcttagaatctgggttcgactcccagggggcccatataactacatgttgaagactaccgccatctcggtattcttctttttttataccaaaaaagcattcctcacggaatgcctttttcaatatcacaattatttagtgcttgtagtcatcaactcagcacgttgtgctaactcagtgtacaaagttgagcctgaaacagataaaccttcaatttcacggcgagtgttgaaatgatggctacccttataagtaccatttgctgctacacggaagatgtagtcgttaaaaccaatatagaattgattgtggttgctgtcataagcaaaaccttgaactggtgaaccagttacgaaattactttgagtagcaccgatttcttctggagcccaagtgtcaccatttctagttaacttccagtattcatattggtgacgaccaccattgtggaacaatgcatacatagtgttgtcgccaacaaaggttgcattatggaagtaacgaggatatgcactgctgccgttccaggtcttaacagtccagattttgttaatcttcatatcactctttcttacttgcataatttcttctgaagctgttgaattagcagtcttattgttattagccaaaacataaatgtagcttgaagaagagccaagtgattgaccatgacctagcttaatgtatggtgaaactttaatattgtttgcgtagcttctaaaagtgctccatcccatagtagttaagttttgagcagcatatttactcttaattgcattcaagttgtaagaaacaagatgtcctcttgagtcgctactgctagtgtacatagaagctgtaaaaataccatcattaacagtaataccttcaggaattaccccaacttgtcccattgcatcagcagcttgaccatagcctaagctgacaaaacgtggttggaacaaacgagtgcgcaaagtcatgccgttacctgaatagctatttgagctagtttctgaacgataaccgtgtgcctgattccaatttcttgatgatccctttgagccaccattccaagtatgaactgccttaggaccactcttaacagaagcacctgcactagtaattccttcatttgtatctgaacgaacagttacattaacgcttgcctttgccttaccatatgaataatctaccttagtagtgccggcacggcttgaactaacagagctatgtgaaacattaaccctatctggattaattgcagtaccttgtccatctgttgcatagttaattgcatccctagttggaaaactgtagttgctgttgtgaactaagctaacatcttgagctactgaaatttggtttctagcaaaaaagttttgacttacccaacctacattgcgtccatcgacaataatgtaccagaagttacctttcttggtagaaacatacttcttagattgaatttgaccatgcttaaagtacttggtatttgaaaatgcacctgatggtccttttttagatacattatgataaatagcgtaattaccattgccagcaatcttagtaactgccttgctgtagcttttggcatctaccttgctttgactaatggcaaaaacaccaccaactaatgcagcactggccacaaaagttaataacatctttttcccttttaacatccttattaatcctcccatatgaaaaaatcacgttcattttagcacaaatttatcaaatgaaacatctaattattaaaaaatttcctgaacaacaagactttgaaaacgcttctgttatataattaaaaagttcacataaatatataaatagtaatagggagaaattttatggtcgaatcacaaaataattccaaaaagatgatgtggaccaccctagcaatgatggccttctctaccgtgtggggctttggtaacgttgttaatgggtacgtctactttgacgggacaaaggttgtctttagctggatcgtcatgttccttctctactttgttccttatgccttaatggttggtgaacttggagctaccttcaagaatgctgaaggtggggtttcctcttgggtaaatgccactatgggcgcaaaatgggcctactacgcaggttggacctactgggcttgccacgttgtttatatttccagtaaaggtactggtggtttaagagcgatggcctggggtatcttcggaaatacaaaatggtatgatggcttacctaccgcttggacacaatttgctacattagtagtcttcttgcttttctgttgggttgcaagtcgtggtattccagtattgaaaggcctagcaacaattgctggttcttcaatgtttatcatgtcaatcttattcatcattatgatgtttgccgcaccagctattaatccttctgctggtttccacagtattgactttaactggaagaatttgatgccaaccttcaacgtaaaatactttacttctctttcaatcctagtatttgccgttggtggttgtgaaaagatctccccttatgttaataaggttaaggatccttccaaaaacttccctaaggctatgatggctttagcaatcatggttatggtatctgctattttaggtacttttgccatggcattaatgtttgaccctaaggtggttaatgccaaccttaacgaatacatctctaatggtgcctacatggcatttgacaagctgggcgaatattaccatgttggcggcttgttcatgtacatctattcatggtgtaacgtaatcggtcaattctcaacattagtaatcagtatcgatgcaccacttagaatgcttttgggtagtaaagaagctaaagaatttattccaaagggcttattaaaactcaacaagcatggtgcttacatcaacggtatctggatggttgttgtcctctctggtggcttaattgctattcaagctttagtaccaaatgctcaagctgttatggcacaattagttaaattaaattcaactactatgccacttcgttacctttgggtatttgcggcatatgttgctttaagaaaacagcagcaaaagttcaacactacttatcaaatgactaaacatcaaggcttagcctatactgccggtatttggtgttttgtagttactgctgcatgttgtatcttgggtatttactcaccagatccatttaccttattccttaatatcttgacgccaatcgtcttgattgcattaggtttaattttgccaggaattaagaaatatcaagaagcaaaggcaaaataaaatttaaatacagaattttaaaaaggaagcaatttcaaaagactgcttcctttttagtgtatatttttatttattagcccaagcatttaccaatgccttgtacttggcaacgctaattcctgcacctttactgcttcctaaatatgaatcagcatttccataaccagtattgcttacattggcaaatcccattactctataatttctgttaatcaaattcaagtagtgtcctgccattttatagccgttcgtgccctctacggccgcatcataagttgccgtccaagttggactatacttcgccggcttcaacgaatgattcttttttacatcataattccaacttttcttttcagagaaccaagtatcaaccggatctaaacccacactttgagtagcgatgttttccaaaccaatcgacttgaaataatgagtatgctttaagccaccacgtttttgatagtcagcatttaacattgaggctgctgtcaaaagtggtgacacctttaatgaccgaaccccttcacttctacgtgctctattgacactattcaaataaggcaatacagctttaatattcttagcactagttgcatcatcatttgaatgcaagtcaacgtattcattgtaccaacttgccttaggctttttacctaagcgacctgttttcaataatttcactgctgatctagcagagcttctttgccctttagtcaaagatttgtttttagatagatatgtcataaaatcaacggcatttttggctgccttaactggcttggaactcaataccgttaaagataaggtcatcatcacagctgatgcacctgcaattaaaaatcgttttttcattctttttctcccatattaatatatgtgaactacgatttaattgtagcacatacactaatggaagattttccttttaaattgcattatccatccatcttaacgtattgtcctttttcatctacaacacctttgaaatggtgcatgctgccatcttcggcctgaaattcacctaagtcaatttccccatagccctttgtagaatcagtaaccttaacatcatcaaaagtttctctgaaaaattgatgaacaattctactcttcaaccgtatatcctttgaatgctcaaaggctgcagacaacgtaaagccctcatctaattgttccttgataaaaacaattagatacaaggtcgctaaattatagcggcgcacaccactttgatcatctgaaatcggcttaatgtagcccttagtttcccaatagcgcaattgcctttgcgaaacaccggtcaatttactaacttcaccgattccaatttctaaattttgaaaaatgtcatgcataatttttttagatttcatcctgataccaccttacagtatagttatattttatatattgttgttatcttttgcaacacttgtgttaatttatctaacttatttgtaagattatttgacaatggaaaattttaagcctatagtttttatagttaacttttataagagaaaggaatattacatgaacaagcaaccaacggatattcatggaaaagcttataatcgaaacctactagttttagttttaattataggttctttctgtactgtattaaacggaacactgctttcaacagcgcttccttcaattatgcgttcatttaacatcagcaccgcaactgctgaatggctttcaacagcctttctgttagttaatggtgttatgatcccaatttctgcatggctaatcaatcgcttcggttcaagaaaaatgtatttgtcagccatgtcaatcttctttattggaacagtgatcgccgcaattgcacccaattttggcaccctgcttgctggaagaatcattcagggattaggcgtcggcgttactatgccacttttacaaacaatcatgctttccatcttcccagctaataaacgtggtgcagcaatgggaactgtcgggattgttattggcttagcaccggcaattggaccaacattatctggttggattgttgataacctttcttggcgttatcttttcagcatcattgccccaattgcgggaatagtaattatcttagctttctttttaattaaagatgttttaccaactaagaaagaaaaaattgatgtttggtcagtaacaacctctactctaggcttcggaagtctgttgtatggtttttcagaagctggtaacaaaggctggaccaatcccgagattttaggatttattggatttggaattatatttgtaatcctattcggtatccgccaattgaaaatggatgacccatttttggacattaccgtttttaaacactttgaattttcactggcagctgccttaagtggtatcaccaacttagcgatggtcggcattgaaatggttttaccattatatattcaaaatttgcgtggcgtttctgccttccattcaggtttaatgttactacctggtgcattgatgattggtattatgtcgccaattactggccgtttattcgacaaatatggtgcacgtaaaatggcaattactggtatgactttgttgaccattgggactattccattcgtctttttaactgaacaaagttcatacacgatgattatcattctttacgcaatcagaatggtcggtgtagctttggtaatgatgaatgttactacatctggtatgaattctttaccattaaacaagatttctcacggtactgctgttaacaacactttcagacaggtattaagttcaattggtactgcaattttggtatctgttttaactacaactaccaataataatatgcctggtaaaagtttacttcatgcactgccacttgaatacaagactagagcaatcagtgcaactttagacggttttcatgcttcatttgcaatgagtatcctcttctcattaatcgcattagttctttcattcttcttaaagaagggcaatcgagcacgtgaacatcaagaaaaggtggatggttaaatgatacttttaattctaatcgtagctgcaattatgtttatttactttaatatcatccctggaaaaaggcatacttctattgcatggctatcattaatcgtaacaattctttgtgttgttggcattgtagaacatgattataatcactggggaatgaaaactgaaacaacttcaagcactaatactctagtttccagtgctactcctcgcctgccaattttgctttatcagcctttaggtaatggaactgaaaaagtttacctttataaaactggtcagcttcaaaagaagccaaaatctattaaattacgcgtggtgctagttaaatcgttttagttaataaaaaagtccaatcttgttagactcgacttgtaaatagtaataatagaaaagagtctgatctgattgaactgccttaagcttaagcgttttagccaccatttacaagttagttttaaagatttagtgataatttgtcggcactggtatcgtttgtatgcaccggctgagtttactcatcggcgaaatattgatcaaattaaaactacggacagtctgattttggctttacttatctggcaagctaagacaggaattgaatcacaaagaagattctgtgaatgtttcaattgtttatcacactcacgttttaatcggcgttcacgtcagctattgcaattgatttatcagatacggcaagaaatgaataaaaaggttgacctgaatggacagttcttgatcattgacagctttccggtacctgtttgccaaccaattcgaaactatcgtgctaaaatttttcgcggttatgccaacattggttataaggccaccaagaaaatttacttctatggtttcaaagttcatgccattgttagcgatgacggttacattcttgattatgtcgtaacaaaggcatcagttcatgatgccagggagacagttgaactgatagaaaatacccatccatctaattactatcttcttggcgacgaaggctatttaggcaaagaactgcatcaacagctaaaacaaatgggttacgaactttggacaccatatcgtaaaaatatgacaggagctaaaaagcacaatgatcatcaattgatggctattcgcagaacaattgaaagcgacttttcgcttctgacctattacaatgccgagaacaatcgagcacgtagtctgataggctttcaaagccggttggaaattgcaattttagcttataatttggcttattgtctagaacgatttaactagcaccacgcgtattaaattagataaagtatcgacaaaagtaaaacgaagcagccaaccaaaagtaacgattaagactactcgctacacctatagcaatacctttaatcaaataatgtttggcgtctttggtcatgacaaggagttaaaacacagagaatatattttttctattccctccaactggaaagtaatgtcagttaacgatgccaagcagttgcaaaaacaaatgatgaaaaaacagcagtttttaaaacaaaaatcagcccaataaaataatgaagctcaaactttgatcatgatatgaaccccgaaattcggacatgaatttcggggtttttatttatggctaaattatctaaacatgacaaaattgatatttacaatagctagaaaaattaaattcattttaactcaaattttaccatatgatttaagttaacttaaatcacctttacaaacgcttatgaaatataatttaactaaatctaaatgtagaaaattatttttatcatactgcctatttcaattgcatcctatcattaaagtaatttttataagccaaatagccactaatcacggctccaaggccagtggcagaaagtaacataaatgtaatcataatctgatacttaattgcataaatgggatttacaccagcaaaaattaagccggacatcattcctggcaaatttactaatcctacagttttagccgaatctatcgtaggctgcatcgcagtcttaatgctccttcttaaaattggcatcgatgcagttttaatatcactacccaaagccaacttttctaaaacttgttgatgcagatcattaaagctatcattcaacgctttatagcataagccaactgccaccatttcatttccagcaatcatccccgtaatgggaatgacctgcatagggactggtttaattacgccagaaaaaatcagaattcctaatgtcacgtaagtccctaccgcttcggctattatcgaattccaaatattccgccccggattaggatcacgctgattagcattccaagatgcattaaaaattatcacaatagttgaaaccaaagttagccacaaggcattaacatgaaaaataaacttcaaaacgtagccgattacgactaactgaattatcgccctaatcacgctaattaaaatatccttggttagtcctaatttttctttcgcagaaattccaatggaaactaacaccagtgcaaaagctaatactaacgaccagttgctaactacaacatttttcattcgattattccgcctttttttactcttaaaatattacttgcttcatcaatttcactttgatcatgtgtaacttgaataattgtcacgcctttctcagaaacatccttaatcaaattatgtacaatatctttactttgattatcaagcccggtagttacttcatctaagagcaatatctttggtaaaaatattatgtttcgaattaacgcaactctttgcttttcaccacctgataaagcagtaatctttttatctaaaaaatcagcagagagatcaacttgattaagtaaatcagctatttgcttgtcatttacatctacttttctaatttcatacgggaaaatcaaattatctcttactgtttgcccaaataaagacggctgctgaaaacaatatgaaacttctctacgatattgaactggatttaaggagctaatgtttttttcttgatatagaatatcgcctgaattagcactaattaaatttgcaatcaatcgtaaaatcgtactttttcctgcacctgatgggccaattaaggttagaaaatcgcctttattaaccttaaatgatacatcttgcaatatttgttttttatctgcactatattggatatgttttaattctaatattttcattcttttgcctaactaaataactcatttttctaattatacaactaaaaaaataaaggaaatccaatattttcattgaatttcctttatttaaattaatatcgataatgattacttagtcaacttttgtttactttcaagtaattcagcacgttgagctaagttcatgtataacttgttgttgtaggttgcgataccttcaatttcacgaccagtgtggtattggtaagtatccttaacttcaccatcagttgcaatcttagcaattacgtcattgaatgcaaggtagaagttattgttcttggcatcataagtaaacccttgagtgtatgtgtttgctacaatgccacccttagttgcacctaccatagttggataccagttatcgcctttgcggttgaattcccagtattcagtttggtctttttctttattataaagagttgtgtaaagcttgtgatcatttacaacaacaccattattgaagtaacgaccgtctgaatcactaccgttccagcatttaatagtccaaatcttgttaatgcacatatcgctcttccgaatttggattaactcttcagacatattgctcttgtatgaaaccttattattgttatttagaacgtaaatgtatttatcagttgagcccattgcttgaccgtgaccaattggaatatatggactaactttaatgttcttaacgtaagaattgaacttcttttggctcatatcaagtaagtattgtccgttaaatgcattggttaaatggttaagattatatcctacaatatgaccattgctaatcagggtactacttaataaactagtgtacaaccagccatttgacatggtaattccttcaggaatatgacctacacggttaatatagtcatcatttttaatgtcacggtaaacacttaataaaactggttggaagaagcgagtagtgaaatctaattttccgctttcactatcataagcatgcttattcttatcaggagtaaaatcagtcttagttacatagttagcagaactgccgtagtaagtcttccaggatttcaaatcgccgttaaatggcttagcttggacgctatcagcatcagcaattccttccttagtactctttctgacagttaccttaacagttgcctttgctttaccatagctatatttaacattataggtacctggagttgagcaatcgattgcatcttctgaaatcttaatatctgctgtatcaattacagtacccatataattggttacataacttactgcatcagttggatcaaaatcgtagtgactattttgtactaaactgatagtctttggtacagcgatagcatctcttgtaaagtagttttggttaacataaccaactttacgaccatttacataaatacgccaataagttgcatcctttgtcttaattctctggtcagattgaatatgagcatattgataatcgctagcatcagcaatcttaccactaggtttaccattactaatctttttataaacaggataattcttattgctacctactttaaccattaagtcataagaagtacttgtttgagctggtcccttcttcgcactggaatcagtcttagcagtatctgtattactatcagtagttttagaattatctgcaaatactgcatttgtagaaccaattaacaaaccaacacccagtgctacagctgaagtagcagttaaaattttatttgaatacttcaaacctatcctccgtatcttatattttgcattttacttttatattataatatataaacactgttagctaaaatacatttttattaccattgttaccattgagcttctttatttgacactttcattacgaagtgatttaattagcactgtacttgaaagagtgctaattaatacgaaatcaattaggaggcaaatttatgctagtacctacagttattgaacaaactgctcgtggtgaacgtgcttatgacatttactcacgcttattaaaagacagaattatcatgcttagcggtgaaattaatgaccaaatggctaactcaatcatcgctcaattactcttccttgatgctcaagacaataccaaggatatttcactttatatcaactcaccaggtggtgtaatcacctccggcttagctatcatggataccatgaactttattaagtcagacgtatcaactattgcaattggtatggcagcttcaatggcttctatccttttgactagtggtaccaagggtaagcgtttcgcacttcctaactcaactgttttaattcaccaaccattaggtggtgctcaaggtcaacaaactgatatccaaattgcagctaacgaaattttgaagagccgtaagaagatcaacgaaattttgcacgaaactaccggtcaacctttggaaaagatccaaaaggatactgaacgtgacaactacttaactgctgaagaagccaaggaatatggtttgattgacgaaatcatggttaataagaagaagtaattaattattaaaaattattcacactctaaaaggagcttgcactcattgtgcaggctcctttttcttattctcttaaactctcagctaactcatgtagtttcttaaatcggtgattaactcctgacttcgaaatcggaccatccggaatttgattagctacttcctttaaagttaattctggatgcgccaatctaaaacgcgctaaaacttgcaatttctctggtagatcatctaagccgttttcttgttcaatcagctggatgtcttctacctgcttagctgaagctgaggctgtttttttcatattcgcggtatcacaattaaccaagcgattaaccgaatttcgcatatctcgcataatacgcaaatcttcaaagttaagcattgcattaagtgcacccactatatgcaaaaagtcgccaatttttgcggcttcttttaaataaacaatatagcctcttctacgtttagttgctttagcatttaaataaaaataattattcatcaacttacataaatcctcattatggtcctcataagttgaataaatctccaagtgataacgactcgtttctggattattgacactacctccggctagaaatgcaccgcgtaaataggacattgctccttcacgtgaagtcataattctctgcggaattcgcgttaccaaacctttttcaggatcccagatttgtaagttttctaggatttcttgtaccttctgattcaatcgtaccaaatattgattattttttttcaatttcatcttgcgcgagacaatcagcaatggctcaataccataagcaatcttaatcagcttaaaaattcgtcgagcaatcgcaggattttctgtagttatatctaggctaaattgatgatcgtgcaagtttaatacaccattcattcgcaaaaaagcagctaactctgctttggcatgctctggatgcacctcaagcgaagttagctcctttttgacttcactagcataactagccatcattttccttcattcttttacgtgacattgattcaaatgccagattaataatttcttttcctaccttttcaccatcatgaaataccaatccatgacgttgatcgataaagtcatcagtaatgacacggcagttttgctttcttaagccttcaaagtcattcttaacaggctcaagataagcatcataatcttctgggtgaaatttgctcatatcaattttggcaccattaaccagagcggtattgatataatttccacctaagtgatcgttaattacctgtacgtgttccgcatcactaaagtgatctgtctcaccacgctgagtcatgatattgcaaatataaataacctcggcgtcagtctcacgcactgcttcacctaaattagagatcattaagttaggtaaaattgaagtaaataaactacctggcccaagtacgactgcatcagcttgcataatcgaagccagtactggtaaaacagctctaggctcttcatccgaatcagtatcggtcacccagacacgcttaatccgcttatctttagatgtgatttcagtttcaccagactccgtagttccatccacgaattctgcgtttaaagtcaatggttcattggatgctggaaaaacatgaccatcaattttcatcatttttgacaaagattgaactgcatcaaagatattgccatgcatttcattcaatgccgcaataattaaattaccgattgcatgtcctgaaaaaaaggaatcggatgaatcaaatcgatactgaaaaatattcttttcttcctgaggtaagtcactaagtgataccaaaacattacggatatcaccaggtggaactacgttaataaagttacggattgaaccagatgaaccgccgtcatctgaaaccgttacgattgcagtaatttccgcgttttgatcttttaaggcattcaaaataactggtaaacccgtaccgccaccaattacgactacgcggggacgtctgcctttaatcacgcgaacaatccttgtttctccatatggcacaggtgcgcacctactttctaatataacgactcacttcacggtgagtaatatcgactggatattttttagctaaatctcgtgccaactgttgggcaattgaaacactccggtgttgacccccagtacaaccaattgcaatggtcaacttttccttcccctctttgatatatccagggatagctgtttcaagcaaatcaagcaattttttataaaagacctgtgtttcttctttgttcatcacatagtcaaatacacgcttgtccagtcccgtaaatggtcttaattctgaaatataaaatgggttaggcaaaaaacgcacatccattacaatatctgcatcaattggcatcccatacttaaagccaaatgacatcacttcaattgaaaatggctgccgcttgcgatcactaaatgtattgattaatttttgctttaattccttagtcgacaagtttgacgtatcgataatataatttgatctatttttaattggcattaaaatacgacgttcttcttgaatgccatcaagcaagcgacctttgccattattggctaaaggcggaagacgccttgtttctttataacgagcaaccaagacatcatcggaagcatccaaaaataggatagtagcttgcacattgccattatcttcaagtgaattaacttcatccaataaatcgcgataaaatgtcttaactcgtaaatcaattactacggctaccttatgaaagtcattggaattattaattaaatcccaaaaactacctaataaagttggaggaagattatcgactacaaagtagcccatatcttctaagtcatgagcgaccacagttttacctgctccgctcatgcctgtgactattaataattgttttttctcatcagccatactgaaatcctcctctttacaaattatatcataccgggtgtgtcataattgtgcaaaaaaaagaagcctttcggcttaaatttttatcaaatattaacggtgcataaatgcaaccacaatttcattaatgccaaagactaataaccagaatgcaactaaccatactaagcttaaggctgcgattactggattaataattaagaagaaggcaataatcaaacttaaaatattcaaaatcaagttaaatacaaagtatccggttgaaaatgcacgtaagtgccatgaccaagcaatacctacaactgaatcaacaaagaaccagattgcaaataagtaagcgatagtcaaaccaccaatatcatatgagcaaatgaacaagataccgataatgatatctaatacacctgacacaattgctacccaactacgtgagaaaaattcacgaaagcgtgagtaagcagccaaccatacaataccttgaacgattgatacaatagcaaaaatcaagacaaatgcatgcaaccctttagctgggtgacgtaataacacgaacgcaactacgaccattaagataccggcaataaatgcgccccagtcaaagccgtgattatctctagaactagaaaaaatatccatttttattcctccttgcagactattttacacttattcaaggttaataaaaactattggctattgtcttctagcctatttttttgcttcttttgttagtttagtatcacgttctaagactggtttcaaatactgaccagtatagctttctttaactttcgctacttcttctggcgtaccggtagccacaatttgaccgccacgttcccctccttcaggacctaagtcgatcagccaatctgcatttttaattacatcaagattatgctcaataattaaaaccgtattgccttcatctaccaaccgctgcaaaacttctaataaacgcttgatatcatcggtatgcaaaccggtagttggttcatcaagaatatagaaatttttaccagtagaaagcttttgcaattcagcagctaatttcattctttgagcttcaccaccagataaagttgtagcggattgacctaatttcacatagcccaaacctacatcaacgatagtctggagtttacgctgaatcttaggaatattttcgaaaaacttagttgcttcattaatcgtcatatcaagcacttgagcaatattctttccccgataagttacttccaatgtttcagaattataacgagtgccgtgacaaacctcacatggtacatatacatcaggcaaaaagttcatttcaatcttgataattccatcaccatgacaggcttcacaacgtccacctttgacgttgaacgaaaatcttgctttagtataaccacgcaattttgcttcattagtttgagcaaataaggttctgatatcatcaaaaacactagtataagttgcaggattactacgtggtgttctaccaatagggctttgatcgatatcgatgattttttcaatattcttgtaacccttgattgacttatacttacctggcttagttgaattattgtttaatttttgggctaaagcgcgtttcaagatcatattaaccaaagtagatttaccagaacctgagacaccactgaccacaataaatttgcccaacggaaaatcaacattaatattctttaaattattttcttgagctccagtaattgtaatctttttaccattgcctttacgacgcttcaatggaaccggcacaaattttttaccagacaaatattgccccgttaaagaatcaggattctgctctacttctttaggagttccttgtgccataactttaccaccgtaaacaccggcaccaggtcccatatcaaccaaatagtcagcttgccgcattgtttcgtcatcgtgctctaccacaattaaagaattgcctaaatcacgcattctctttaaagaagcaatcagccgatcattatcacgttgatgcaaaccgatagatggttcatccaaaacatacataactcccgataagtttgagccaatttgagttgccaaccgaatacgctgagcttcaccaccagacaaggtattagctgatcgagaaagagttaaataatctaatcctacactatccaagaatgaaagacgatcgcgtacttcctttaaaatcggcttagcaatcatagtctcttgctcgcttaatttgacgtccttaaagaaatcaagtgctttatcaatagaaagctccgaagcttccgcgatatccttgcccatgactttcactgctaatgctttttcattcaaacgcttgccgtgacaagttgaacaagtaagttcagtcatatatttgcccatcacatcacgcataaacttggacattggtcgtttataacgccgctcaacattggccattactccttcaaatggttgaacggtatcattaacgccaaagtcaccagttacatggaatttcaccggcttagttgagccatgcagaataatgtcgcgttgacgtttagttagtttattaaaaggcttatccatcggaatttttaatgccgtgcaagcttgttccaacatttcagtatagtaattggaagtcttccatggagccagtgcaccttcagctaaagattttgttttgtccggaacaaccaaatcttcgtctactgctaacttcatccctaacccatcacaatcaaggcaggcaccaaatggtgcattaaaggagaacagtcttggttccatttcacccacagtaaagccacactttggacaagcataatactcagaaaagttaagcatttcaccaccaattacatcaacattcatgtagccatctgacaaacgaagtgcagcttcaatagaatcaaataagcgagacttaatgctatccttaacaatcaaacggtcaacgacaatatcgattgagtgacgcttgttcttagctaattcaaaatcctcaccaatttcgtgcatctcaccatcaacaattacacgaacatatcctgcacgttgcactcgcttaaatacttccttgtgttctccacgcttagcacgaataactggcgctaaaatttgaattttcgttctttctggtaaagccatcactcggtcaaccatctgatcaactgattgtcgttgaatcagcgtcccatcattaggacaaattggatggcctactctggcccaaagcaaacgtaaataatcattaatctcagtgacggtcccaactgttgaccgtggattatgtgacgttgttttttgatcaattgaaattgctggatttaaaccatcaattgaatccacatctggtttatccatttgccccaaaaactgtctagcataactagaaagtgattgcacataacgtctacgcccttctgcataaagcgtatcaaaggctaaagaacttttacctgaaccagataagccagtaataactactaacttatccttaggaatagttaaattaatgtcttttaaattatgttcacgtgctccgcgaataacgatcttatcatttgccattaaaattctttccttttcttgatgatttttgcaattccataattgcatcccgcaagttagcagcttcttcaaagtcaagcttcttagctgcttcttgcatttgctcttgcaagttgctaatcattgtcttcttttgcttagccgtcaattcatcaaaattaagatctgcaaaactatcagatttttcttctttttcactcgacggtttagtaatcgaaattacgtcttgaatcggcttaatgattgtcttaggcgttatgccatgctctttgttaaattccatctgaattttacgccgacgcttggtagctttaatcgctgctctcatggaatcagtaatcgtatcagcatacatgattacttcaccattggcattacgggcggtccgtcccatagtctgaaccagcggccgatatgctctcaagaagccttccttatctgcatccagaattgctaccagtgaaacttccggtacatcgattccttcccgcaacaggttaattccaattaagacatcgaacttacctaaccgtaagtcacgcaaaatttgcattctttccagcgtcttaatatcagagtgcaaataacgtactttaattcctaagtccttcaaataatcggttaagtcttccgccatttttttggtcaaagtagtaacaaagactcgttcatgacggtcaatccgtttattaatttcgccaactaaatcatcaatttgaccctcaattggccttacttcaatcttgggatcaagcaatccggttggtcgaataatttgttcaaccttatgatctgttcgttcaagttcataatcacctggggtagctgagacatacaaaatttgattaacatgcttttcaaattcggatagctttaatggacggttatcaagtgcagatggcaaacggaaaccatagtcaatcaaggtttgcttacgattacggtcaccattgtacattgctctaatttcaggcatagtagcatgtgattcgtcaattaaaattaagaaatcatctgggaagaagtccaacaaagtatacggtggctctcctgcttttcgtccttccatatgccttgaatagttttcgattccgttggtatagccaacttcacccatcatttccatatcataggtagtacgttgcttgattctttcagcttcaagcaatttgccttcgccttcgaactttttaacctgcaatttcatctctttagaaattgctcccaaagctcgccgcaattgctcgtcattggtcataaagtgcgtagctgggaaaagcgaaatactctcacgctcaccgatcacctcaccggttaacgaatcaacttcaacaatgcgatcaatttcatcaccaaagaattcaattcgataagcatgattagaattgccggctggaaagacctcaactacatccccgcggacccgaaaacgaccgcgttgaaagtcaatatcattacgatcatattgaatatttaccaaatcacgcaacaaggtattacggtcatattcttcgccttcatggatcatcaagacactgcgcgcatactctttaggatcacccaaaccatagatacaagaaaccgaagcaacaactactacgtcattacgctccattaaagctgaggtagtagcatgccgcaactgatcaatttcatcattgattgccgaatccttttcaatataagtgtctgattgtggaacgtaagcttctggctgataataatcatagtatgaaacaaaatattcaactgcattattaggaaagaaacttttaaactcaccatatagctgccctaccaaggtcttattatgcgtaataactaatgtaggcttattcagcttagcaataatattggccatggtgaaagttttcccagtaccagttgcaccttccagaatctgttctttatatccttttttaaatccagcagtcagtttatcaatagcttgctcttgatcaccggctggtttaaactttgatactaattcaaatttgcgatttttttgtcgtttaatcataaaaaactcctcaagaaaaaagttggacaagcatagtccaactttttaattagtatctatattttactaccgcgaacgtgctttcgcacgaaaaatgcttaattatttaagtaaatctgctaaagccttttgataatcttcagctgccttttctgcagtggcaatgtcttttttgtttacaccaacataggccttaattactggttcagtacctgatgggcgaagtgctacccaggtttcatcatctaagaagtacttcaacacattagattctgggaacccttctaatggtgtctttttgccattttcaatagtttctttttgcaagaaatcttgaatcttaagcactttactaccgccgatttcagttaagtgctcattacgcaacttgctcattaattcggccatcttcttttgaccaccaatacctggcatttcaattgcacgggtaatttcataagcaacgccatacttttgccaaatttcttgcaaaccatcaaagacagtcatcccacgtgaagcatagtatgaagcaacttcggcaaacatcaatgcaccctgcatggcatccttatcacgagcaaatggtttaaacaaatagccatagctttcttcaaagcccatcaagaacttagcatcaccagctttattcatccggtcaacttcttcaccaatgtacttaaagcccgtcaaaacatgcttagtcttaataccaaagtcctctgcaatcttaaatggcaaagcactagaaacaactgaagtaacgatctcataatcaggggttaattgaccattttccttcatatgagccaataggtagtaagccatcaaagtagcaatttggttaccagtcaaaacttggaaatcaccatcagtttttctaactgctgcacccattctatcagcatccgggtcagtagcaataatgacattagcatttacctcatttgccaacttaaaaccaggttcaaaaacatcacggtattctggattaggcttaattgtggttggaaattctggatcaatgattgattgacttggcacaggaatcacattatcaaagccgccttgtctgaaagcacgatcataaagcatcttgcctgtaccatgaagtggagtataaatgatctttaacttgtcagcgttggccttaaccatctctggatcaacagttacttgcttcaattcattcaagtaatcttcatcaacatcttcacctattaactgcaaggtgccattagcacgcaattcttttactggtgcagccttgacagcaaaaatatcagttactttttgagcataagcaaaaagtcgatctgcattatctggtgccatttgtgcaccatcttcaccgtaaactttatagccattgtattgcttagcattgtgtgaagcagtgatattaattccagcgaaagtatgcaaatgacgtactgcatatgaaagttctggtgtcggtcttaaatcatcaaataagtaaacatgaattccgtgtgcacctaaaactctggcagcatgttctgcaaactctcttgagtgatatcttgaatcaaaggaaatagctaccccacgctttttagcatcagcaccattttcttcaattaaacgagctaagccttcagttactcgacctacagtaaacaagttaatccggttggtaccgggttcaagacgaccacgcatccccgcagtaccaaaattaatatcctgtccaaaggcatcttcgatccatttttcatccttgcccaaagtatttaattgatcttttaaataatctggtaaattagtagctttttgccattctgtataaatttctttagcgtccatcaatgtcctctattcattaaaagttggatttctaaagcgctttcaaactgttaacaattttctattatctgctattaattataaaacttattagtcattaatttaagctttagacaaaaaaagacatgtccaatacgaacatgtcttaatgaaaaaacgaataaatttaatttttcttgtcttgtaagtcttggtagtaattatatgcagcttgaccagctacactaccttcaccaactgcattagcaatttggcgtaaatctttttgacgaacatcacctaaagcaaagataccaggcaccttagtttccatatgatcatcagttacaatccaaccatggtcatccaagataccaagatccttaaaaggttcagtttgtggtaaaacacccacgtaaataaagacaccagcaactggaatttctttttcggcaccagtttccttatcgcggtacttaacccctgtgactttcatgtcatcgcctaagatttcttcagtttgtgcattccaaatgaaatgcatcttcttgtttgcaaatgcacgcttttgcaaagttggttgtgctcgcaattgatcacggcggtgaataactgtaacgctcttagctaattgtgaaagataaattccttcttcaattgctgaatcaccaccaccgatgacagctacatcttcatctttaaagaaagcggcatcgcagacggcacaatatgaaacacctttgcctgaatattcttcttctccaggcacattcaaatgcttatgatctgaacctgtagcaataattacgatcggtgcacgatactcattgccatcatcagttttaactaacttatcctcgccatcgagttcaacactttgtacgttgccatacttataatctggttcaaacttcatcattgtgtcgtacatcttttgactaagttctggacctttgatttcagaaaaaccaggataattgtcgatagcatcagtattgttcatttgaccgccatagggaccgcgatcaagaacaagaatctttaagttagcacgcgcagcatataagccagcagtcatcccaccaggacctgcaccaataataattacgtcgtatttatcagccataatctatccttctttctacttacttttgataagcaaataatacaatagatttaacttcttgccaactattttgcttatcttttataaacgaatttcaggctttggttctctacccatcattttcttaatttctgtatcaacatcagcatcttcataaagaacacggtagattgcctctgaaattggcatatcaatgcccttttcttcacataattcgtgaacagctttaacagtagtagcgccttcgacaacttgtcccatatttttcaaaacgtaatctaaagtcttgccttcgccgatttgtttaccagcacgccaattacgtgagtttactgaagtacaagttacaattaagtcaccaatacctgacaagcctgagaaggtcattggcttagcaccaaagtattgcacacccaaacgagtgatttctgctaaacctctagtcatcaaggcagctttggcgtcatcaccatatccttggcctactaaaatacctgcagcaatcgcaattacgttcttaacggcaccaccaacttctacacctactaaatcatcgttagtgtagaaacgaacgtagtcattggagaacaattcttgtacccgcttagcattttcttcattagttgatgcacatgcaatcgcggttaaatctttttgagcaacattttctgcgtgactaggacctgaaattgcaacaatcttatcttcatcatctggataaatttcttcagttaaaatttcagaaataagcttcttactgcctggttcaatccctttagttgcagtaactaacagtggcttagcacccgtcttatctaaaaccttgcgtacgtttttagcaacgattctaactgccttagttggcaaaacaaataaaacaagttctgccccatcaagagctgcttccaaatcaccagtagccttggtattctcatttaatttccaatccttcatatagtggctattggtgtggtgagcgttaatttcttcattaacactatcaatgttaccgtaaagagttacatcgttaccattatcggctaacattgaacccaatactgaaccccatgaaccattacctaaaactgcaatctttgtcattttttctctcaaactttctaattaaaatcttttattaattctaatctcttgaatacgggtattttaatccactaccatccaaataccattttggattaacgactttccgccgataaatccataaaataattgtagcaataaagaggattaaacttaatgcctgtgatactcgtattataccaaaaatatacagactatctgtcctcattccttcaacgaagaaccttactacactataccaaagaagataggtcatgaaaacttctccctgcttgaagagatgttttttatgacgcaaggatagaattaagattaagccaatcaaattaaaaaatgattcgtacaaaaaagttggttgataatacgtcccgcctattttcatttgctcaataataaattgtggtaagtgtaagctttgtaaaaaatgaagagtagttggtgcgccgtgcgcctcttgattaacaaaattaccccagcgtccccaaatctgagctgccatgactccaggagcaatgatatccagcattaaaaatggaggtagcattcgtttataacagaaaatcaacagcacaattaagccggcaattaaaccaccataaatcgcaatcccaccattccaaatcgcaataatttgctcgggatgctgtgaataataaccccattcaaaaatcacataataaatacgtgcgccaacataccctaacggtactgcccacaatagcaaatcgacaaaatcatctggaataatttgacgtttttttccttcgttaatcgccatccagcaagctaacataatggctactgccataatgatgccataccatttgacacttaaattccctaaatgaaaggccaccggattaattactaaattagtcattatgcggcaccttattcgtatcttcttttgagtgctctgaaatcagactagtcaaattattatcaaaagtttgagttgcatcatagcccatcttcttagctctgaagttcatcgctgcaacttcaataataatttcaatattgcgtccaaccttaactggaatattaacctgtggaattggtacattgcagatttcacgcgtattttcttgaaaacctaggcgatcataattagcttttggatcccaattaaccaaattaattaccagttggatttctgttctattttttacggcaccggcaccaaataaattcatcacatcaataatgccaattcctctgatctccattaagtgctttaagatctttggtgcttcacccacaacggtattatggtctttttgaaaagcatctactcgatcatccgcaattaatctgtgtcctctttgaactaatcccaaagcagtttcagacttaccaacaccagatgcaccagttaacagcacacccatccctttgatttcaaccaaaacaccatgaatgctggttcttttggctaaacgagcacgcaagtattcagttaaaatactggatatgtaggtagttgactctcttgtacgcaaaattgggattttgtgttcctctgctgccgtagttaattcttccggtacaggcaaagagcgagaaatcaaaaaacacggtgtagccttagtacacattttgttaaagacatgcattctaatatcatggtccaagcgtgccgcatatgaaatttctgtccgacccaataattgaattcgttgcgcaggataaaaatcaaaataaccagttaattctaatccagggcgataaatatcagaaacataaatttcttcatctttgatatattcctgtccttggtaaacttcaaggatactctgattgtcctggatcaatttgcttaatctaacttcatcagccatattaggcctcctaactatttatcaatatctttagtggtgacatttctagctttttttcttggtctaggaccagaagtactagtagccttaaaccactcacgataacttccactacttggcatattatcttgatttttccttccagtaaaccgataaataagccaaatgattaaaatcgcaattacagctactggtaaaagtaaaataaatgccttaaatagaacaaacaataaacttaaaataattagcgctactaaaacaagcgttacaatttccattaaactcattttttaacctaatctggattctcttgactaagcaaccactgtaaataggaataaataaacggttgcaattttccgtccattactccttgagcgtcagctgtttcatgacctgtccgcaaatctttcactaggttgtaaggatggaaaacatatgacctaatttgtgatccccagccaatctccttttgatcgcctttcagagcctgcttttgcttacgctttttttcttcttctaagtgaaaaagctttgctcttaattcattcatcgcagtttcacggttttgcaattgtgaacgctgtgcctgagacgtagtcacaattcctgttggtaagtgcgtaattctaacggcactagaagttttattaatatgctgcccaccagcaccactagagcggtaaacatcaacccgtaaatccttaggatcaatatcaatttgaatactgtcatcaacttctggaatcacttctacagaagcaaatgatgtatgccgtcttttagccgcatcaaatggcgaaattctaaccaaacgatggacaccattttctgatttaagcattccgtaagcatttttacctacaattcgcgcactaacgctcttcaacccagcttcttcaccaggctcataatcgttgatttcaaatttaaaaccagctgtatcacaataacgttgatacattcttagaagcatctgtccccagtccatcgcttctgtaccgccagcaccagggtgaatttccatcaaagcattatggctatcatacttacccgacaagagcaggtctaactcataattatgaaaatcttcttgcagcgtagctagatccgcttcaacttctttttgcaagtcaggatctggttcttcacgcaaaagttcaaccgcagtagtttcgtcttcgtagctagtttgcaattttaaaaatgaatcacgtttttcctttaatcggttggtttcactaattaatttttgcgctttttcctggttattccaaaaatcaggctgcgccatcttgttttcattaatttcgatgctttcatcaatcgcatctaagtcaaagagaccccctaaagtgatttagacgtttttttagttcatctaacacactttgaatttcactaatttccatttttacctaccatcttttattttattgcaaaaaaagggaagctcttaactcccctttttctttattaacgactaagattttgtctaatttcagccttcatgaacaaacgagttacatcaaattcaatatttgaaatcatttcttcaaacattctgtaaccagaatcttgatattcaactaatgggttcaattgaccgtatccacgaagaccaattgattgacgcaactgatccattgcatcaatatgatcagtccaacgatcatcaaccacacgcaagataactaccttttcaaattcaagcatttggctaggatcgcctaaggccttttccttatcttcgaagttttgctcaacaatgtcataaagcttcttcttcaaatcttcaacactaatagtcttgaagtcaattgagtcagttaccttgtctgaagtcaaacttgaggaaatgaaatcgcgtaatgagtcaagacgccattccttgcgttcaccttgagtaaacattgctacttggtgatcaattgttctgtgaatcattggaattaaaacattcttcaatgacttatcagcttcaatgacctgcattctttcgccgtagataatttcacgttgaatacgcataacatcatcgtattgcaaagtttgcttacgagtatcatagttattaccttcaacacgtttttgagcagattcaacttggcgagtaatcaagcgactttcgataaccttatcatcatcattatctgataaacgatccaagaagtccttaactcgatcaccaccaaaacgcttcatcaaatcatcttcaagcgacaagtagaatctggtgtaacctgggtcaccctgacgaccagaacgaccacgaagctggttatcaatacgacgtgattcgtgacgttcagtaccaataactgccagtccaccaagttctttaacaccaggccccagcttaatatcagtaccacgaccggccatgttagtagcgatagttacggcaccacgttgaccagcgttcatgatgatttgagcttccttagcgtggttcttagcgttcaaaactgcgtgaggaatacctgctttatcaagcatcttactcaaacgttctgaactttcaatggcaacagtaccaaccaaaacaggttgaccattagcgtgacgcttcttaatttcttcaactacagcgtggaacttagagtccaaagttggatacaaaatgtctggcatgtcttttctggcaattggacggttagtaggaatcgtgattacctgcatgttgtaaatttcacggaattcttcctcttcagtcttagcagtaccagtcatacctgacaacttcttgtacattctgaagaagttctggtaggtaatagtagcttgcgttcttgattcttcttgaatcttaacgccttccttagcttcaatagcttggtgcaagccatctgagtaacgacggccttccattacacgaccagtgaatgagtcaacgatcaaaacttcgccatcttgaacaacgtagtcgatatccttaagcatgatgtagttggcacgaagagcttggtcaatgtggtgaaccaacttttggttttcaacatcgtacaagttctttaggccaaagtgttgacaagccttttcaataccagttctggtaagtgaaatagtcttagttggccagtcaatcttgtaatcgccgtgatcttcatcatcgtcggcatcatcatcgctcttgtcttcagtcaaagtcttaacaaagcggtcagcacggatgtaatcactgtttgcttgttcagcttcaccagaaataatcaaaggagttctagcttcatcgattaagatagagtcaacttcgtcgatgatagcgtagttcaatggacgttgtaccatttgttccttgtaaacaaccatgttgtcacgcaaatagtcaaagccaagttctgagttagttgagtaagtaacatcacagttgtaagctgcacgcttttcgtctggtgacattgagttcaagttcaaaccaacagttaagccaagccacttgtaaagttgacccatttcttcttcgtcacgacttgaaaggtattcgttaacagtaacaacgtgtacacccttgccttcaagtgcgttcaagtatactggcatggttgctgtcaaagtcttaccttcaccagtcatcatttcggcgatgttaccgtagtgaagtgcaataccacccaaaatttgtacgtggaatgggtaaagtcctaatacacgcttagcaccttcacgagcaactgcgaatgcttctggtaaaagatcatccaaactttcgcccttctttaaacggtcacgaaattctggtgtctttgcttgcaattgttcatcagatagcttgctcatttcatctgcatgagcttctaccttagctgcgattttttcaaatttcttaagttctcttttatcgtcgttatatagtttctttaaaatatttaccattaaatcggtccttatatgtcgtaaagtctaaaaatacagaataattttaacatgtttatcagcaaaataaaaatattctaaacaaaaaaccccacgctcaaacaaacgcgaggttttgaattaacgagtattttaactcaattattcgttagtttcaattaagccgtaacgaccatcgtttctacggtaaacaacgctagtgccgttagtttctgcatcttcaaaaacgaagaagtcatgttccaacatgtccatttgtaaaatagcttcttctggatccattggctttaagcttacacgcttgttacgaacaatatcaaattcgctaggcttcttttcttcttcttcaggttgttctacaaagaaatcttgtaatcccttttcacgactctttctatttacacgagtcttgtactttctaatttgacgttcgagtttttcagaaacgaagtcaatgctacgatacatatcatccgtggtttcttcggctctcaaaactaagtatggtaaaggaatagtaacttcaactttagctgagtgatcacggtatactctcaagtttacgtgtgcaatcacatcttgattcaattcgaagtacttctctaacttgtttaaccgcttttctacataacttctcaaagcatcagttacttcaatattttctccacgaacattgtactttaacatataagattctcctttcaccgctatgcggtttttctttacaaatttattataccaaaaaatgtaagcgtttcataacaaatctaatgacaaattgaaaagctttcaattttcatttcgggaaaaccctgctgtaaacggtcccgcgcgtgatatagcgtgcgcccggtcgtgtaaatatcatccaaaattaatacttttcctgaaactatattttccttgattttaatatttttatcaatcaaaaagctttgaggcgttttaagccgctcctctttgtttttctcaccttgggcatgactacccgattgtttaatcagaagcggtgtcagcggcaaaatatcagcataaatagcaaaaattgtatcaaactgtcgtcttgattgatgttcaggtgaagtgggcacgggcacataaaagtcatagttagttttacacaaatagtcataacacaaatcttgcaatacttcccgcaaaacataatctccacgccgcttatacgcaaccatcaagtcatgaaaagcagaattataacgatataaagcatgattatgcagaatattttcgccataaatggcttgccaatttcgacaatcgctacacataaagccttgacctagttccttatcacagccagagcagcgattgtctgctaacttttcaaattgttttaaacattgcaagcaaattttactttttcgcgctgttttaaaagaaaaaagttgtgcaaattgtaccggtggagtaaactcctgctcacataataaacaagttctcatctattcatccccttgatctgcttaatactctgtcgaatattcttggtataacgatgataacaatacaaaactaagcccgtttggtcatcgtgagcccgaccaactcgacctgcaatttgcaccaaactagcagcggtataaattgcatcatctgctgcaataataattacccaaacatttttaaaagttacaccacgctctaaaattgtggttgtcaacaataagtcatatttacgatcacgaaaagcctgtactttttctaatcgttgcggatcttgtgcatgaacaccggccaatttaattttattttgcaactttttccgcaaagcttcttgataaagcggaatttcttcaatccgtggtacaaacaaaagcaaaggatgaccactttgaatgacttttttaatctcctgcattaatttaggatgaatttgtcccttccgcaaaaacggcctgataaaaagcctttctcttggtacaggcaataatccaccatgaaaacgccgatttaagcgcaaaatttctaacttccctgttttagcttccaaaagcaaatcgttcgttggcgttgcggttaaatacattcgagtcccagttgttttaaccgcatttttggccgcaaaatgtagttgcggattacctacataaggaaaagagtctacctcatcaattaccaataaatcaaaggcacgataaaacttcattaattggtgtgtagtacaaattgtcaactgctctagccctatttccttaaattcacggccatgatacttaccgatctcaacttgggcaaacgctgccgaaaatcttggaaacagctcatttaccacatcaattcttggtgtagcaatacaagcgcgctgtccttttttcatacatcgagcaatcaactgaaacaacatctcagttttacccgccccagttacagcatgaaccaatgtattttttctttgttcaaaattttgtactaatttatccgaaatattctgctgcaatggggttagtttaccttgccagcttaatcccccgtttttaacatgagaaaaagtattattactgtcttttctaataagccaatcgccctcatttgcacgtcccaagccaatacaaccacgacaataatatttaccattaggcagtcgactattaacttggctgccacagcgattgcatttacctttttcaattactggaattttacggcatccctcaaatgtgctagaatcctcttgactaacaatccattgacgacctgataatagagtcaaatcttccatatttttacctccctattatctattacgcaaaaagaggcgattattttgtcagaaaaggaaaattttttaactattaaagaaaacggcaccggtgaattaattatcaaaaagagcagattcattgccaatattgcccgcaccactactactgatgcggcaaatgattttattcaaaaaatctctaaaaaatatcgcgatgcttcgcacaatacctttgcctacacgatcggcttaaatgacgaccaggtcaaagaaagcgataatggtgagccatcaggtacggctggtgttcctgaattaaaagcattgcaattaatgaatttaaaaaacgttacagtcgtagtaacccgttattttggtggaatcaaattaggagcaggcggtttaattcgtgcctattccaatagtgtcaccaatgttgttgaaaaagtcggcgtcattaaacgcgttttacaacaagaattaatttttagcgtaccctataaccgcttcgatgaagttgatcattacctaaaacagcaaaaaatttttattgccaataccgaatacggtgtggatgttaaaattcatatttttgttaacgatgaccaacaagctaaacctaaggaagacctaactaatttattggccggacaggttacctttactaatggtgaaaaacgctataatgaaattcctgttgaagctaataattatcatgaacaataaaaagagcatttggatatttccaaatgcttttttgctacttattattttttttactcttcaattgatctggtttttcgtctcctaagtgccaaacttcaattgttggatcagttttactcttttgattaataattttctgaattacatgcatcaaaggatggtatttttcacccaataaaccaattgattccacaaaatactctaaggcaatcagcaagcctaagatcagaagccaagtgccccaagttggcgaaagcaggaataataaagaaataaatgagaaaaccaatgataatgcgtaaatagtcaataccgtctgtcggtgcgttaaccccattcgcatcagctggtgatgtaaatgatgcttgtctgcttctgaaattggctttttgtttagctttctccgaatcattgcataaacggtgtcagtaataggcactcccaaaatgataattgggaccaacaatgaaataaaagttacattctttaaccccttcagagataaaacggcgatcataaaaccaatataaagtgcacccgtatcacccaagaaaatttttgctggatggaaattatatggtaaaaagcccaataaacaggcagctaacataaaacaagcaattgggacatatagctgatgagtgtgcaagaagaaataacctacgatccccatggtagtcagagagatcattgaaaccccatcagctagcccatcaagtccatcaatcaagttaactgcattagttaaagctaagatccaaaaaatagtaattgggaaactccaccaacctagatttacttcatgtgcgatgaatggcacctttaacacattcattctgattccagctaaaaagtagataatcaatgaagcgataaaaatcccaaacattttttgtctaggttttaactccaaaatatcgtcgatcaatcccgtcaaaacaattacgcttgaagcgagtaaaatcgaaaaaatttcatgagtcggaaattgctcacgcaacagaacaaaagtaccgatattaaaagtaacaaaaatccccagtccaccaatcgttggcattggtttcttattaactcgccgggcattaggattatcaacagctcctaagacaaaggcaagccgtcgaataaacggtgtaattgccgctgaaataattactaataagaataattcaacaataattttaaacatatttggctactttccttatttacttgttctaattatacaagtagtcagtattttgcacaaatagcaaaaaagtttggaaaaattatcttccaaactttttaatttatttagcgatcgccacaactcttttttcacggataacggtaatcttaatattacctggataatcaagttctttttcaacctgattacgaatatcacgtgccaaaataactgtccgatcatctgaaatttcgtcaggttcaaccatcacacgaacttcacgtcccgcttgaattgcataagcctgcttaacgccttggtagctcttagcaatcttttccaattcggtcaaacgtctaatataattttccaaactctcgcttcttgcaccaggacgagcactagaaatcgtatctgctgcaacaacaagttcagcaataaacgacaacttaggcacatcgccgtggtgtgcagcaatcgcatttactacaacatctggttcatgatatttacgagttagttcaaccccaatttctacatgggaaccttcaatatcatgatcgatggctttaccaatatcgtgtaataaccccgcgcgaactgctaatttttcatccaagcctaattctgcagccatcgtgcctgctagcttaccaacttcaattgaatgtgacaaaacattttgtccataagaagtacgatatttaagacgacctagcgtcttaactaattcaggattcatccggtgaattcccagctccatcaaagcactttcacctgcttcatagatgtcatcgttaacttcttttctggccttatcgaccatttcttcaattctagctgggtgaatgcggccatccttgattaagcgttccatcgctcttttggcaatttcacgtctaattggatcaaaaccactcaaggtaacaacctttggcgtatcatcaataattagatctattccagtcaaagcttcaaatgaacggatattgcgtccttcacgaccaataatccgtcccttcatctcttcatttggtagatcaacaacagatacagttgtttcggcaactgtatctgccgcgctactttgaatagcatccacaatgacctgattagcataatgatcagctttagcttttacttcttcgttactatttctgatcatctcggctcgttctttgactagttcatcagataattgactaagcacaatcttcttggcttcttcctcatccaacttagctacgtcataaagcttttgccgtctagtttctactaattcttcagcctcagttaattttgcctttaagctagcatactgctgctttaattggtcttccttttgcgtgagtccactttcacgttcatctaataaagaattcttatgatctaaggtatcttcacgttgttgtaaacgatttttctcccgagctaaattatctttcttggaatttaactcatcctcggtcttttgcctaaaatcacgaatttgttcttgagcttcaagaattttttcttttttagtattttctgcactttgcttaacagccgctgctgcttgcttttgtgcattaacttcagcttgtgctgcagcaacctgtgccttagcatcagctaaaatgtggtcagcatcattctgggcattttgagctttttgttcccaagaatgcttgcgaattgcataaccaaccactgaacccaccaagaatgaaacaatggcagttgcgacgggaatcataattgttaacatattattcatgattactatcgccttttttagaattattcacacaacttttatgataaagaacctatctgttcatgtcaattaaatcaaaaaaccttggaaaataaatccagggtttttgacataattatttagcttgttcagactttttatctgtagcagcttctttttctgtcttggcttcttcgcgcttctccttgatcttttctggatcttcacgatcagcaattgacttttcatcaatcccgtaagcttgacgcacttgcttttggatatcttgataaatatctggatgctcttctagatacttcttagcattctcacgtccctgaccaattcgatcactcttgtaagagtaccaagaacctgctttatcgataatgtccttatcagcagccatgtccagtaattcaccactttgtgaaattcccttaccgtacataatgtctacttctgccaccttaaatggtggagcaaccttgttcttaacaactttaattttaactctgttaccaagaacatctcctgattgcttaatctgttcagctcttcttacttccaatctaatagttgagtaaaacttaagagcacgaccacctggggtagtttcaggattaccaaacattaccccaactttttcacgaatctggttaataaagatggcaatagttttggttttagaaatattacctgataacttacgcaaagcttgactcattaatctcgcttgtaaaccaacatgggcatctcccatctcgccttcaatttctgctcgtggtactaaggcagcaacagagtcgactactacaatgtcaattgccccactggaaatcaaagtatcagcgatttgcaaaccttcttcaccagtattaggttgtgacaaaattagtgaatcaatatctacacctaaagcttcagcgtaagcaggatccattgcattttcggcatcaatatatgctgcagtaccaccacgcttttgcacctcagctacagcatgaagggctaccgtagtcttaccagatgattctgggccataaacttcaataatacgaccacgaggatatccacctacaccgatagcagcatctaaagctaatgaacctgttggcactgttgaaatttgcgtatcagctttttcgcccatccgcattacagcacccttaccgaaattcttttcgatttttttaagcgctgcatctaaagcagcctgtttttcgtctttggccattaatgtcctcctatttttcgtacctaataattatactttgaccgccgtccaatttgcaagagaaatgcaaacgaacgttcaaaggattttttaccctctattatttattacgctaaaaatcgccattatttttttacaaaataaaaaaagaagcaaatgcttctttttaatcattcttgacttaatactattttacattgagcccttgaatacgccccatgattggtggaagtaatcgtaacctgagtaaatagtaaagatcaacgcaaggtaaagtaagatagtaccaatgtggaagaagtcaccaatcaataagaaaatgattgataacatttggcaagtagtcttaattttaccaggcatctttgctgctaaaacttgtccttcattttctgctaagatcaaacgcaaaccagtaacagccaattcacgacaaacgatgatagctactacccatgctggagcaagtttcaattcaactaagaaaatgaaagcagtcatagttaacatcttatcagctaatggatcagcaaacttaccaaaattggttaccatattacgtgaacgcgcaatgtgaccgtcaaaccaatcagtagccgaagcaacagcaaaaacgatagcagcaataacacgactccaaacaacagttgagcctgctgcttgaacactagcattcccaccaaaaatgatgattaacataaatactggaatcaaaaagattctaaaaacagtaagtttattaggtaaattcattctaacactcctagattttaattgttgttattatttccaccatcattgccattgttagtgtctgctgatgattgagtagtagatgattgttgagtttgactactttgttgggtttgttggctactttgagtagtagtagatgattgttgacgactgctttgacgagtagcactgctttgagtagttgtacggctttgggtagaactactattggttgtattgttattagtagagcccgtattattagaactactattattttgactagtagttcccttagccttaccaatcaacaaagtaattgtcctgtacgcattgtttgctgtatatgggattttcttacctgcaatagtgattgaagtaccattatcgttgcctaaagtaatcactactctctctgcattgcttggcaaagtcatagtgtgcttttgattagcaagtaaagttgattgccagctattagcattaccattgacttgtacacccgctgaaatattttggttttcaccagcacgcacaactaggcgacggtttttattcaagccagtaactcggtactcattgtcactaaccttagtaaccttaactttattgactactacttttttagctttcttagaagatgacgatgatgacttttgtgatgaaacagttacatcattattatcagcttggttcttttgaccacctgaagaaagacgagcatacaaaacgtacactacaagaattacgataattacaccaagtccgatcgcaattcgtggcaagtaattcttccacaaatttttcttattgtcggtggtttctcgtacttcttcactcttattatcaatcgagttttctacgtactcatctggcttagcttctggtacatcatcgtggtaatcacttaataactccttaccatccaagccaacaacttgtgcatattgacgaataaatgctctaacataaaaatcgcctggaagtttatcaaattcattcttctcaatcgcttcaagatatctgctctgaattttagtagctttttcaatatctgcaattgaaagtcccttagcctctctggcgctctttaatttatctccgatatctgccatatttacctcttcaaattttaatttatcatgttgagtataccataaaattctcattacaacgtcttagttataaaagccatccacctgtaacataaattgtctgtcctgttaaataactactacgtcgatctagcagtgttctaacccagtatgaaatatcactgccattggcccaacgaccaactgggatttcatcttttacctcttgaatcgtatcctcagaaaagaatgcattcattttggttttaaccgcaccaggcgcaattacattaaccgttaagttattggaagcaacttcacgcgcataagcctgagcgaacctggttataccacctttagttgcactatagacgctttctaatgcactacctgcaccaccatagactgagcctaaataaactatacgactaaaatctcgtttcatcagttgtggctctaacaatttagttaacttaattggcacagtaagattaatattaatcagatcagtgatatttgctaatttttcatcacctaaaaaaccatacttagtaattccttgagcaaaaactactgcattaactggcaacaagtttttaacaaaatctgttaactgtgcatcccctgtcgcaaaatccaactgtagcgacataaaatcctggtcaggatgcttagcaaacagctcttgaactaaattttcagctttttgagaattagaatgataatgcaagtataatgaccaaccggcatctgccaaatctcgacaaatatcttgaccaataccgccagttgcaccaaagacaattgctcgcttcaactttatcaaccccttacttgttttctaagtaagcagaacaaagttcactgtctttcataatcttttggcagtagtcataaaactgatcaaaattcatcgcctgcaatttagctatattttgtgttaaattttcatgatctaaattttcttcaattaattcaattgccaaataagacagatcattacttgtcctagcagtgcgtgctaaccattctttcttttgcaaaatgaagttttgtctaataaaacggtattccgctgaatttttcttaattggttccgtcaataccctctttatttctgcaattacttcttgagcttgaggacttacaccaaaaatagtagcaaaatcgccctgcctggtgtaattaacagaaatctgcagcgaatccattaacaactgcttttttctcatttcttcaaaccatggtcccattgcacttagttttgattctaacattatttctaacagaatttgagtcaaatcaaagcttaataatactttcttaaagtttttaaagcgaattcctaaaccaaaggaattagaattacctctggctggcaagacttgatcatgtaacatgcgaaaactaacttgtttttcagctgtgcttttacctttcccgtgcaaatatttttgctgcagctttcctacttgccgcaaaatcgtttgcacttgattatcagaaaaatcaccgcaagcaacaaattgcatcttttctggcacatacttagcctcataaacttgggtcaagtttttcactgtaacttgattaattgattctttcgtacctacaacttcgatccctagattagaatcaccaaacatatcatgcataatcgcattatttacgctccaagttgggtcatcctgatacatggccaattcttgttcaataatcggagcctcttgcgcgatattttccttagtaaaatacggctgccctaccaattcaaacaagagatcgatcattttaggcgtatgctcaattccactacaataaaacattgtttcattaaaagacgtgaatgcattaacgtcagcaccaatatcttcaaattgcgttgacaaatcaccatcttttttggcaaatagcttatgctctaagaaatgagccgaaccggcaaccttttgtggatcactactaccaaagtcaacaattataccgaaaaatcgttgataaaaatgtggctttaaaataatttcggctttaaagcctgactgatattcttttttgataatttttggtgtcatcattttaaaacataactttcattaaagaataaattttgtgcgaaagctactaactgcttaggtgtagctctcctaattgcattttcacgatcaaagtctaaatatcccgagaacaattcatcacgcaacatttgacccatctgccagttttgaccgtctagaccaatcttcatattacgcaaaattgcctttttagcctttttaaataaatcatcttctacttcgccctgaactagtttacccatttcggataaaataatttttcgagccgctgcaatcttactaggatcaagtcctgcactgactaaaaacaaagaattattggcaaagcagcttgcttcaacattataagctgctcccaattgctcccgaatttgcgtaaataatttagatgattgatcacctgccaaatattgcgataataatattcccattacttgaccgcgataatcaatactttgttctaaaccaaagcccattaacaattgagcttgcacatttccttgatcatcctctttttcaatcaactttcttttagctggaatagttagactagctgtttgaaatgatttagttaaaccagtttgttgaaacatagcctgagctaatttagaaaccagattattatccctggtcattcctaaaatttgcattggtacattagctaaattacgccaataatgcatcatagtcgtgctagtcgcagctttgatttcatctagtgagccaataaatgtctccgcataatcaggttgatcctgataccacaatttaaaaaactgctccaacgcataattagatggttgttcaatcagttcttgatattcttctgctaattgacgtttagcatattccaccaaaggttccgcaaaattaggttgattaactatttgtgcaatcacattaagaatttcttcatacgtataatgtggatccaaaatctcaatcggctcaacaaaattggcataataagtcaaaagtatttctttaccaaaaacttgtggcataatctccagctgtaaatcatataattctgccaatcttttttgttgtaaagcaagtgacggataacttaagctgctattcatctgtattcgcgctagcaaactagcataagctaaattatgtttagtcagcggcaaacgcaaaaaacagccaatagcggctgttgtaaactttttattttttctaattgcaatattagttgtgagcattgtttgaattaccttcattctttattggtggcactaaaacttgtcgtggcttagagccttcagatggaccaacaatccctttagcttccatttcatcaacaattctagcagcacgattataaccaattctaaacctacgctgcaacattgacacgctggccgtctgttgacgtcgtactaaatcaacagcttgctcatagaattcatctgctggctcatcatctttactatcagcatttgatgaattttcaccttttttaggaatcattgtctcatcataactaacctcttgttgcttcttaacccattcaattacgcgttcaacttcatcactagcaatataagcaccttgaacacgttcaggtttagatgccccaattggcatataaagcatatcaccacgaccaagtaatttttctgcacctgtttgatccaaaatagtccttgaatccactccacttgatacagcaaaggaaattctcgatggtacatttgctttaatcaaaccagtaataacatcaacacttggacgctgagttgccaaaatcatatgaattccggcagcacgtgccatttgtcctaaacgaacaatcgcgccttcaacatcgtgaccaccaaccatcatcaaatcactaagttcgtcaactacaactagaatataaggtaacggcttcatcactggtttagttttatcacgattgttttcagcaactttttgattatattcactcatgtttcgcacgccaccagccgcaaatagcttatatctgcgctccatttctttaacaactttgcgcagtgcatttgcggctagcttagcatcggtcaccacagggatcaataaatgcggcacaccattataaactgaaagttcgaccatcttggggtcaattaaaactaatttaacttcttcaggccgcgccttcattaaaatactggctaaaattgtattaatcgctacggacttaccagaaccagttgaaccagcaatcaataggtgtggcatcttagctaagttggcagaaataatgcttccagttacatctttacccaatggtacatccatcggatcgcttttggctttattatcttgatgttccatcacgtctttgaatgaaacaacagacgttgctcggttaggtacctcaattccgataaagggcttaccaggaattggtgcttcaattcgaatatctttagccgcaagcgccaaagccaaatcatccgctaagtttacaattcgacttaccttaacgccaacagctggctggacttcataacgcgtaatagttggtcctaaaatagcttttttaataatcaccttaacgccaaaactcttaaacgttgattgcaaaacttgggtatttttcttaattaaatcacggtcagtactctgatcagtcgatttaattggatcaagtaagcttaaaggtggcatcttataagctttattgactggcgcatcagtttttagttcaccatgatcgacatcggctaattcctgctttaacttttgatcatcttccgcaaaagaatgtgacttaggtagttcctttaccccgtcatcatgttgtggtgcaatttgaatttgcggttctggatcaggtgtggtctctggctcaacttctacgtcttcagccgtcggcgttacatcgtcatcagttggatcggcagggtcaaagtctgctacattaggaaaaatcggtttatcgtcatcaactaaatcttcgtcttgttcctcttttttctgacgccgcttttccaaaacgtcattatatttatctttgacctttaccccagcttctttattctttttgatgaataattgactaactgtctggaatttttcgataattgttctaaatttaacatcaaaaaacatcaaaattccaattggcagcaataaaatagcaaaaacacggacaccgatttgccctagtagtggataaaaaagttgataagctaatgaaccaattaatccaccaccaatgctctcagtgactccagcacgaccaaactccgcggccattgcatgccaaaaagaattcaggaaattactgttaactaattcatgttcaaaatacaagttacattgaattaacagaattcccaaaaaagcgattgctaaccccaagctacgcttaattgttaagtgaatcggttgattatagattaaatttactaggccaaaaagtcccagtaaacctgccgcaaacaaataagaatccccgaagaacattcgaatcaaatttgcgatttgcttacccaaaataccgaaacggacaaaagccagccccgctattaaaatcaagactaaaccacaaatactccaattaagattttgctttttgtttgcttttcgcttattgtagctctttttggcctttctttgtttcttttttgcaggcatgtactcacctgattaattatcgaattcagccttgaagttcaagttaaccggctgacccaaagttaattgggttgtttcatagatcaaggtctcaagttgctcaactaatggtcgagttagtaactgccaatctgaattactaatgtcagagccatcaccatggtaatcttttaattgcacgatttgatgaatcaagccgcttgcttcaaacatagctggtgcaggaattacatcatattgaatagcaacatcatagtaactaccattttcttctgaatgctcatcgtcaccgctaacatctaattttctaattcctggtctaacgtcactaattggtttggtatcttcatcaactaaatcataatgaaatgcctgtacgataatatctgtctgtttttcaaaatccattatttattctcccctagattacgttcatatctttcaggacgatcatagtcatcttttaacttgtcattttcataatgatgggttgtttccatattaggaaaaccttgctggcgtaaagcttctagcaaaaccattgctacagaattagacaagttataacaccgaatgttatcagacattgggatacgtaaattacggtcatagtattcacgcataaaagtttctggcaaaccagttgtttctttaccaaaaacaaagtaataattcttgttaggatcagtataatcgacttgtgcataattttttgatgagaatttagaaattaaatacatctcatcattaggccctaaagtcttcaaaaaggcattcaagtcatcatgtctgcgtacatcgaccttatcccaataatcaagacctgctcgcttcatttttttattatcgatttgaaaaccaagtggttcaatcaaatcaaggacagtgttagtccccgcacaagtacgagcaatattgccagtattagctggcatcaatggttcatacaaaactacatgattagtcattcaaaaaactccttatcaaaaaaagcgtagcttttaagccacgctttaaaactatctagtatttattcgctttcgtcatgatctgcatcccccgtggtcgaagaaacagcattctcttcaaagagtttagactctcttcgataataattgtacacgcgagacacaataatcttcaagatcgcataaattggaataccgaaaactacaccccataagccccagacggcactagcaccaatcaagagtaaaattgttgtaattgggtgcatttccattttattccccattacccatgggctaagaattcttgattcaattgtttgttcaatagcaaaaacaattaagaccttaattaacattgaacctgaagtcataattgaaattacaattacaggaatcattgctaatggtgtaccaaagtatgggattaagttcataaacccagctaaaattgccaaagccacgccatatggtaaaccaattagaatgtaacccaatgagaacatcacacctacccaaaaggcaacagtaatttgaccacggacatatgaagcaacagcatagttaatatcatataataatttgctaaaactaggttgccatttttcaggtgcaaacttggtaatatatggccgcagttgatgaccatcttttaacatgaagaataaaataaacggtgcagttaacaaagtcatagccaccattgtaataatgctgacggcagatgaaatattgccgatagttgcattgatggtactttgtccagacttaaataaggtcttctgcgtattatcaatcatgcctttgatactgcctttaaatgaatgtaaacgcggatcttgcaacgcattttgtgttgcattaaccgcatcattccaaatatgaggccagttctttatcaatgaattaatctgattctgtgcaattggaaccaagatattaataatccaaattaatgcgacaactactagtaagaataaaactataattgtcaccactcgcggaatcttaaattttctttcacaccaatcaacaaccggattcatgatatagtactgaattaccgctaataataatggcggtaaaattgcactaaagaagatccaggcaggattcaatacaaaagatactttattaaagacccaaataattaaaaagaatagcaggacgtttaataaaacaatactaaaacgattatctaagaaccattttttaaaaacagttccacccctatgttggttattttccatctattcatcctaatttttaaatgtgttcataaacaatatcatcatcaaccttaaaattaggtaatggttgatcaatatccggatcaaagtagatcgcattagcaagtggcgtcttagaaacgggacggttaaagaacaaggttgcgtgtcccaatgccttcatgttgctctctaccatcggaccaacatagtttgcaacataggtttgaccatcaacagtgattgtatcgccttttttaaaaacaaaaccactaactggcgtctcagtactgaatttttgaatgacagaaacgtcttccaaatccttattagcaccctcgccaaataaaattaccatgccatctttattatcgacggcctttttaccaatttttttaatatttgcaatccatttcataatataatctctccttaaaaataattttagcataagaaaagctgcttaaaaacttaagcagcccaaaatcggcgattattttttgctcaacaggaaatcgtgtttttaagcgtctaatccgctttcatgctatactttattttagacttatttttatttagagatggaggcccacacatatgaaggttttaatcggaggttacaccaaaaaaacttccaaagggatttatgaattacctattaccagtgcagcaaatgatgcccgtttaggcaaagctgagaatattattagcgttggtggtccaacttatttccgaaaagatggtaatttaatttttactgttaataacgctggcgataaaggtggaatcagcgtctttcaattaagtgatcaaggcgcaaacgaagttgaccactatttaactccaggctcttcgccagcttatgtaggaattaaccgcaccaaaaagttgatttacactgctaactatcatactgctgtcttgtccgttttccgctacaacgacagtggcaagctcgatctagttgatactgtaactcacaaagctgaaacgttgggtccgcgtcctgaacaagttgacggtcctcaccctcacttctttgatgaaaccccagctggtaacttggttagttgtgatctaggcaatgataccgttgatttttatagattagaaaatgatcaattaaaacacattgctcaatataagtgcgaaactggctttggtacacgtcatatcgtcttcagtaaagatggcaattacttctacgttgtcggtgaactttctagtcaaatcaatgtcgttaaatttaacgaagacacttgggactttgaaaatattgctacttataagacaattcccgctgattttactgaccataacggagctgctgccttatatattagtcaagatggcaaatatgtttacacttccaacaggggacataattcaattgctgtcttcaaagttaacgacgatcatactttgagcctggttcaacgtgtatccacttttggtgacttccctcgtgattttaattgggataaagatcagcgctacgtcgttgtcgctaatcaaaatacagataatgctactctttacacaagaaacgctggtactggtagcctaactcctattcaaaaagaaatttccgtaccagaaggcactcgcgttcttttcaccaaatagtaattagcattagtaccaaagtcatggcgcaatagaacgtcatggcttttttattcctacaacttaaagtaaaatagaaataaatgaaacaaaatataagtcatgtggtaataagtcaaatgaaaggcgatgatatttgttctttttgatcataaatttgagtacgcgtggtgctagttaaatcgttctagacaataagccaaattataagctaaaattgcaatttccaaccggctttgaaagcctatcagactacgtgctcgattgttctcggcattgtaataggtcagaagcgaaaagtcgctttcaattgttctgcgaatagccatcaattgatgatcattgtgctttttagctcctgtcatatttttacgatatggtgtccaaagttcgtaacccatttgttttagctgttgatgcagttctttgcctaaatagccttcgtcgccaagaagatagtaattagatggatgggtattttctatcagttcaactgtctccctggcatcatgaactgatgcctttgttacgacataatcaagaatgtaaccgtcatcgctaacaatggcatgaactttgaaaccatagaagtaaattttcttggtggccttataaccaatgttggcataaccgcgaaaaattttagcacgatagtttcgaattggttggcaaacaggtaccggaaagctgtcaatgatcaagaactgtccattcaggtcaacctttttattcatttcttgccgtatctgataaatcaattgcaatagctgacgtgaacgccgattaaaacgtgagtgtgataaacaattgaaacattcacagaatcttctttgtgattcaattcctgtcttagcttgccagataagtaaagccaaaatcagactgtccgtagttttaatttgatcaatatttcgccgatgagtaaactcagccggtgcatacaaacgataccagtgccgacaaattatcactaaatctttaaaactaacttgtaaatggtggctaaaacgcttaagcttaaggcagttcaatcagatcagactcttttctattattactatttacaagtcgagtctaacaagattggacttttttattaactaaaacgatttaactagcaccacgcgtatttgagtatatgaaactaagccttggtaaaggttgatttttttaatgttaaacttttgtttacttttaaatttagaccaatttttgaaattaagacctcggtgtcctgtacagtttgtcatctttgagcaatttaaagataactcgtactaattttcttgcagttaatgtgcaagcacgtttatgcggcgagtagacagcttcatcatacttcttttggtaatattttttgaaaacaggatcatgtaatcttgctagattggcagcttcaatcaagtaatatcttagatatctgtttccagtcctggccattggagtatgttcgttgctgtgatctcccgattgatattgattccaggttaggccggcatacttagccagctgttcttctttatcaaagcgatcgatacttccgatctcagcgataataccagctgtataggttttgccaataccgggaattgattccagaattttgctttctggtaatgcatcaacgatacgatcaattgctttttctagatctttaatagattcattaaagctttgaatcatgttgtaatgaacagaaagcactgcatcaattgaatcagtcattactttgcctaagcgatatgaacctctaacagctttcttaattgctttagccaaggtatctggatcggaaaagcgtcctctgcctttaacctgtaagtaagaaattaagtcttcggtaggcatatccgcgatctcatccagagttttactatcggttacaatagacatcattgtagcaccgaaaagaggagtattaatcttatctttatcgacagtgattagtttattaacccgataatataaagcttcaatgaagtgctgtttggtacgagtcagttcttgaactaattcatatctggtacgcgttaaacgctctaaagcaagatagttgtcttgtctggcaatgcttactcgataatgtccaaagcttagatacaaagcaatgtaataagcatcgagaggatcagttttactttcttcaaagactttatgaaacctgctggtttctttggggttaattacatcagtctctacattgagcttttgtaaatcttcgtcattttggaaaaagtaagcaggatgaaaactgtaaatagatgtagcttccatgccaataatgatttgatcatagtgtttattttgagctagatctaaaatttgttttttcagttcactagcaccataaagatcattgacaaagctatcgttaattaagcgtttgttttgatcttctgaatcaagtgcaacgacctgtaaatctttagaactaacatcaataccgacaaataatttcattggaaatggcctcctttctttcaaatttctgatcatagattttgatcttcacatgttaacccctaattacagttcttaagttcaatctcgccagtataagtattcactggttgcttctttgaaagctgcacctaatcccaattgctcaaggactagcaaaaagaagcaatcaatacagcatgtgagttagagcataaaggaactgtctgggtggcagacttataaagcagacaaaactgcaggaggtgataacctagaccagttgaccaaagccaatgacaattagaggctaacatgtgaagatcaaaaagcaaatactaatttgattaattatcacaatatgactaattacaatttatataatacgagaaggtgacaaagtgaaaagaaaaataattcgaatattacttttcattcttggcgggatattagggttactacttctgtataaactctatttaaattaccgtcctgaattgaatttattacttcattttgatcaccataatgaagaagtactcgttaacatggtccgtagccatggtattgaagacttagcctttttatttttacttaatgcgatctgtgtagcaattcctggcttatccaacggaatcttttgtgttctcaacggaatcctttatggccctgcctggggatttattgttaattggatcagtgacattttaggccaaataattttaatggaacttttgcaaaaactctatgacatgaaaaagatgtctaacagtaaagtttataagttattgactggattaaaatcaccaatgcttggattaattattggatatatgattccatttattccgagtgcgacagttagctatgtcaacattatgattaataaggagcaacgtaaaaaacagctaataccaatcattatcggtgtcatccccttcgcttacttatatgcttatggtggcgattcaatcttgcacttagacggaacacgattgattaaagttgtaatctcattcgttgtcattgctttaattgcagtagctattttgcttagtctgagagcaatcaaaaagcgtacaaaaaaagcttgaatttactcaagcttttttattatgcctagcatatttaaactaagttagcttcttctaacagttcttcgacccaagttctcttgattttcttcatccctgttttgagagctaacttctcaggtaatggcatctcttgatcaactaatttcttcttgtcagacatgtagtacatcgcacgaagcaattgacgaatatcataaattgagtcaaatacttcaggtacaccacggtcaacgttaagcaatgtataaacagcttccatggcagttctgacagaatattcggtggtaaagacagtgtctctagttggtgattcggcaaaattgccaataaaggcaatattaactgatccttctggaacaacatctggacggtccccatcatgacgaggcataaagtaactagtgatatatggcatgtaaactggtacggtattcatattttcttcactagccaattcgctgatttgactctctggcacgcctaagtgatagagcatttcctcggcaatttctttaccagtacagtcaacgactctcttcttgatgtaattaccctcagtatcagaatacaaagcataaatccaaacaacgatttgatctggattctggctcttaaagtgaggttgacggtgaatagtaaagctaagttcccaattagagtcaacaacagtgataattccaccagtattaactttaccatcgtaaaggctgcgcttagtcaagcgttcaaagtatggagctattttcttattttccaaggtagctgtagctgatacgaaccaactacgctctggcaagttttcacagaagacatctggatgaccaaagtcaggatcttgtttagccaaattttcccataatttccatgaagagcccttgtcgtgagtaattggtgctggggtattttgatcaccataagtagaactttcagtgattgaaccgttagtcacaaagacaatatcatctggggttaaatcaatatcactttgctcaccattcttggtcatcacgatcttcttggcaaccttttgcttgccctcatgatcaacaaccacgttatcaacgtgacaatcatattcaaattgaacaccgtgatcttttaaatatgccaaaagtggcttaaccatggactcatattggttatacttgttaaacttcaatgcggtaaagtcaggcaaaccatcaatatggtgaataaagcgcattgcataacgccgcatttcggctgctgagtgccatttttcaaaggcaaacattgttgcccagtatgtccagaaattagtcttaaagaagtcatcactgaagaattcttcaattgtttcaccttggagttccttttccggtgtcatgattaacttcacgatttcattagtgcacttacctagaccatattgaccatcacttggtaagcgatcaccgcgattataaattagacggcaattggatgagttaggatcttctttatcaagccaataatattcatctaagtatgatgcgccagggatttccaaacttggaatcgatctgtacatatcccacaaacattcaaagtggttctccatttcgcggccgccccgaaccacgaaacctgcattaggacgcttagcaccatcaagtgaaccaccagctacgggtagctcttctaaaatatgaatattttcacccttcatttgtgcatcacgaactaaaaagacagctgcagaaagaccggctaaaccactaccaataatataagcagattttttatctacgcctgcgggctttttggcatccgcaaaagcctcataattaccattggaatagtacataaagatatcctcttttctgtataagtatagtttttaacattacactttaattataaagaaagcggttactagatgcgagttttttagaagttttagctaataactttagaattctttattaattagtttctgccacagttcttgcatatcttttggatcattcaactcaattgttttacatttttgctggctaaatggatccggaaaatttaaataaaagcaatttaaggcttggcgtgaaaacccatcttgaattccatataaaggatcaccatataaggggtgtcccagataagccatgtgaacacggatctgatgggttctaccggtaagcaagcgtaactctaccaagctagcacctgtaacctgatctaggactcgatacgcggtttgagcgtcctttccatctgccactactgcacgtttaactccactaccctttttgccaatcggttgatcaattaaaccagttaactcattcggagcaaaattgccatgtacaattgcatgatattttttgacaaatttctccttgccaattttactaaaacgagcatgggaaattgcatttttccccaccaatactaaaccagatgtatctcgatctaatctagtaataacatgcggcttcaaatttttctgtcctttttgggcaaaataacccaacaatcgattgaccaccgcatcatcatcttcatagcgtgagggaattgacaacacacctgcaggtttgttaactacaagataatttttattctccaacacaattgatactggattattcgatggctttaaaaaatcatttttcttttcttcaccactgataaaaatcacttcatccccagcacgcaaattaaagctagtatatcttcttttatgatttactaaaatcatgccatgatggtgtttagcattgtttaacgcttgatgcgaaaaaccattttttaacaaaaaaggacccagctttttggggtctctttcttgcacaattagtttaaataaactagtcatttttttcattatctccaataaacgcattttgtacgcgtgaccaaaaatgatggtggccaaattgatcaaactgaatcgaatgccgcgaaattcgatattcaatcttcttagcattacgtacatcaattcttgctccatcaactgtcatcacaaaatgatctgcattaggaacaatcgaaatccattgatcaggcgcaatcacaattggtgatgacaaagttctaaaaactcgattattaattgaggcaatttcagtcatttgcaacgcttttagccggggatgaattactgcaccacctagtgatttgccataagcagtcgaacctgttggtgttgaaacgcaaagaccatcgcctcgaaagttttcaaataattgatcattaatgtacacatcggcctctaatgtatgtgaaactcttttaaccgctgattcattgacggctaaatggtaatgagtttcacctgattcagtgagcatctttatttctagtaaaggatacttcgctggttcacccttggttactgctaaagcatcaaccattttttcaatatcatagttacgccaatcagtataaaaacctaagtggccagtatgaatcccaataaagcgcacagaatctacttgattttcatagcggtggaaggcattgatgagggtgccatcaccgccaacagtgatcactacatcaggatatctagcatcaaagataaaacctttttcctgaagcagcttcttaagctgcgcaactgtctttaatgtttcatcatagttattatgcgctattgttactttcataatttttctttgcccttatttttggtaaaaattttctgagcttcttggacctcatccttaattgacgacatttcttcgtctagtctataagcggcttcagccgttgattttaatctagctgaaatgtcatcaggatagacaccttgatatttgtaatttaaagtatgttcgacagtagcccaaaagttcattgccatagttctaatctgaacttccgcaattaattttttcggaccttctggtaagtaaaccgtatagttaatcaccatgtggtatgaccgatatccactcggcttagcattttgaatataatcacgctcctcaacaacttccatatcatctcgagcatgaatcaaatctactaccttataaatatcgtctacaaattgagtaacaatcctaatccctgcaatatcttgcatatcagtctcaatgacatcaggactaattactcgccgtttcattttttccttgatagaatcaactgtctttacccggccaattacaaattcaataggtgaatgttctcccttagttaaaaagccttgtctaagggaacgaaatttaacctttaactcgcgaacagcttcgttataaggccacaagaagttatcccaatctaattccatgagaaaacattcctttcttaagcaaacaaactcattttaccatataattaagttaaacagttcggaggaaaaacagatgagtaaaaatcgagaaattgaagcaaaaactcttttaaataaaagcgtttatgatcagatcactgccgcttttccaatcaaaagtgactttacccaagaaaattattattttgatacagcagatgatttattaaaaaatcatcaaattagcttgcgtattcgaatctatgctactcacgcagagcaaacaatgaaggtaccggatcctaatcctgtacaaaagaatttccatgaagtaattgaaattaatgatgaattaactcacgctcaagctaaaaaattagtagcaaaaaagcattttaaattcactggtaatattggcgcatatctagataatcattttgccaatgaccaaaaaaagctacatcttttcacctggagcaaaacccgcagaattttgatgaacgggccacaaaactgtgaattaactctagatgctacgtcttatccagataactatcaagattttgaattagaaatcgaaaatactaatcctgctttaattcaaacagtattaactaaacttgaacaagaatatgactttgaacaaacggctgctaacactaatcaaagcaaaatagctcgtgcaagcgctcaccaaaaatagtatatagaaaataaggcatattttttgtcacttattttttttcttgctaaagtaactaatagtaaatcaccaaagaggtcgagattatgtttgagatttttctattcatcaatccaatagggatttattgttatgacactgaaaaacagattcgtaaaaccgttgatgaattaggggtcgacgtttgttatcactatattcccattgcaaatgtttgtttaatcaatgatgatgcgattcgccgacgcaaagatgaccagaagttgcctgatattagtaatttttctagagcaacttatgaagcattagaaaattaccacgcgattaggctggcctatggcaacaaaaaagcccgtcaatacctgtatgaattacaaaaaaacttgagcaaagatgcttcagcttatacacctgagctgcttaagcggatcgcaaacaaattacatatcaaggatgcggatattcaggcaatcaaacaaactgattacctgcgtacttctattgaagaagatcaaaaactagccaaccaatggaatattaaagctactcctaccaccgttatctttaacgaagacaacgagcaaaatggagtattgctagagggaccaatcaatcaacaggatttagttaatctaatgcttccagattgtcaaaagtgtttttcagactatttacctgcggagcatcatttacgccttatctaaaggcgttttatttttgcaaaaaatcactaacccgatctctttcacctgggttacgccaagtagcaaaaactttatcaggtaaatcatcaagagttaatttgcgttcataaagcatctctcctattttcaatcctaacttttttttttgcataatttgctggcgtaaatattttctttgagttgcaatgttcaaagaatattcttttttgaatggcttaaagcgccaaaaatcttttatccccaattcatcaaggacaaatgatttactttgataaaccaatttattagctaccggttcttcgaaaacattatattttaagcaaaaacgatttctctgtggattaatttctaaatagtaattcccccaagctttattttgtcgaaagaaaatcaactgtgtgcgtttcaatcgccgtttcaaatagtgtcgctgtcccacaatccaaatatcttttacaccaattttttgataaagctgatgccgatggttaaattcttgttgactcaacggcgcacattgaacttcaaacgctaacttagcagttgctaagacatctgcacgcaattgtccttcagctaatggaatctcaacttctgccggaaaaccagctgccgtcaaagctgacttcaacagcattttcgattggtgatgctcctctttttcacccattaagttactgtacttcacaagatgcttaaaaaaggctgctttttgctccgacataaccaaaattacttttttattgcaatgtggacagtgataattatcacgattcaatttcttttgccttgcattaactaaacatgcttcgtcaactgcaaggactaatttcttatttaacatggctgcatacatttttctcacccatgttttattacgtaaaaaagagacggaattttgtcccgtctctttttctttaaagaatcttaataattagctgcttttaaaaagtaatgtcgaatctggcctaaagcattttgcatcaataagcatttgcctgtttcttcaactacacgcatcttatcactatcgaccttaaaaccaaattcgttggctattgtccacgcatctgctggtttaagctcctcatattcttcatcaagaaatgccaaatttaagaaatattgtccatgcaagtaatacaagctagaagctaaatcatttgccttaaggttatcagctaattcaattagactacctaaatcatcaaaatagtaagcctgagtcttgcgcgatctccaatcagttggctcattgtttttatcatcttggttaaaaaagttgtgagtagctggtccttgaggagccgaatttgaattcgtactctcctcatctaaatcaaagaaactttttgaatcatccgaattcgttgatgattgctcatccttaggaaagctatcacccattagtttccttaaattctgtgcatcgtccggcttaactttggtgatcatcaaatctaatcccccattattaggcattacttgaaatgatactggatcaccattggcaaattcatggtcttcatcgacctcatcaagaattttatagaagaagtcttgaatcttttgtctattacctaataaatcaagcattcccatcccacgacgagccaattcagctttatcaattcgaactctgatagtattcttatcaatatgatctacctgcacaggatctcacctccatgaattaatatatctattgtagcgtatttttcgtttaaaataaaagtgttagtctcaacaaaagccttaactaacacttttcaatcattttataaatctgcaatcttttgtgcttcagccaattccaaccgacgaacttttcgtggcaagaatcgacgaatttcatcttcattgtaaccaacttgaagtcgacgatcatccataatgattggtcttcttaacaagctaggattcttttctactaaatcaagtaactgatcaattgataaatcgtctaaattgattcgcaattgttgaaaagctcttgagcgggtagaaatgatttcctcagtaccattttcagtcatccgcaagatctttaataattctttttcccggatttaaaattgaagtgcaacactaagtgttaaacaaaaaggccatgaagacctaaacttgaagtgacgaaaaatcaagaaaggaagatctttatgaccaattcaaattctagcatttctaagcactatcatcaattaaccagcgtacaacgtggacaaattcaagcaatgctggattccggcataacttcccgtactgttatcgctcaagaagttggctgccataagtcgacaatcagtcgcgaaatcaaacgcggaagcgtcctgcaaagagacagcagctatttattgtatgagcactattacgctgatactgcacagatttattatgagaagcgtcgcaaaaactgctatcagcgcaatccattgaagcattatgctgtctttttgagaatgctctccagacgctttaaagctaaatttgatgccaccagcatcgatgagttcgttggtgaattcaaaaggactatgccaggctacccttgtcccagcacaccaactgtctatcgctatattgatcagggcttgctggacataagcaatattgatctgcctatgaagctcaaaagacgcaggaacaagcgtcatcacagccatggcggtcacgctttgcacaagaagcatcttggcaattccattgaacagcgtcctaaagagattgaagacagaaaagctccgctgcactgggaaggagatctggttaaaggcgtcagacgcaagaatcagcctgctttaatgactttgactgaaagaaccacacgctttgaagtagttatcaagattcctgactatcgggcaagcacatgccaaaggctgcttcaaaaggagattgacagacatcctgcctggtttaaatcaatcacgtttgacaatggctctgagtttgcggatatgaccaagatcaagggctgccagatttactttgctcacccatattctccatgggaaaggggcaccaatgaaaactgcaatggtcttttgcgtcaattcttccctaagggcaagagcatgaaagacaagtcaaaagcttatgttcaacaggcaactgatgccattaaccacaaatatcgccgaatcctccaatatcacacagcagaagaactcttcaagcaatatatttcctcatagcctaactgttgcacttaatttgacaattcaggaataattcttttttagtcaatggttcagaaaaaatgtttctttccttgaatggaatattatgtttttcaagccacgctcttgccttgcgacatgaagtacaactaggagagacatataaatctaccataaaaatcacgctcctcagaacaaatatttgtatacgtttctttactcatagctagtataccatataagcttctttttcgtaagtgcttaatttatcgtttacctctgctatttacttaatactaaagataaaacgtgaattatttgtgaagatttcgttcgttttgtttaaaattattaaaaataaaaaaagagacatcacagtctctttttgcaaattaaaactacttgttcaattttttcattaaattattaactaatttttcgttgtcttcagcagtttctgatacataacaagcttcgttagctaattctttaatgtcagcagtgttcaatttcttcattaagcttctgatacgcaaaattgaagttgcactcattgagtattcatcaagtcccattgaaagtaagattgggaacatagtgttatcaccagcagcttcaccacacataccacaccaaataccgttttcatgagcaccatcaatagtgtgcttaatcaaacgaagtactgatgggttatatggttggtacaagtatgacacattatcattaccacggtcagcagccatagtatattgaattaagtcattagtaccaattgagaagaagtcaacttcctttgcaaattgatcagctaaaacggctgcagcaggtacttcaatcatcataccgacttgcaagtcatcaccaatcttaacgccttctttagcgagcttatctttttcttcagctaaaatttgcttagcttcacgtaattctgctaaagtaccgatcattgggaacataattcctaatggaccgtatgcagatgcacgaagtaaagctcttaattgagttctaaagatatccttgtattgcatagaaagacggatagcacgaacacctaagaatgggttcatttcttctggaagatcccagtaatcaaggtgcttgtcaccaccgatatcacaggttctgataatggtttgcttaccattcataccttcaataacttccttgtaggcatcaaattgagcttcttcagttggaaagtcactagagtccatgtacaagaactctgttctgtacaaaccaatggcttccgcaccattatcctttacacctggcatatcattaggtgtaccaatgttagcagcaatgataaatttcttaccatctgcagtaactgatggttcattcttaagcttagcccattctgccttttgcttaatgaatgcttcactcttttgcttgtaatcagctacttgagcgtcacttggatcaataattgcatccccgtcaagaccatcagcaattaacatatcgccgttcttaacatccttagtaattgagtcagtaccaacaacagctggcaattcaagtgaacgagccataatagctgagtgagctgtacgaccaccaatatcagtaacaaaacccttaacatactttttgttaagttgagcagtgtcacttggagttaagtcgtgagctacaacaattacttcatgatcgattgaagcaggatttggtaattccttaccaagaaggtgagccataatacgctttgaaacatcacgtacgtcagcagcacgttcttgcatgtaaggattatctgtcatcccttcaaaaatagcaataaacttcttagcagtctcatcaagagcagcttctgcgttgatctttgaatccttaatttcattctcaatggcaccagtaaattctgggtcatttaaaatcattaagtgtgcttcaaaaacttgagcttcttcatcgcccaagctttctttagcaatatcatgaatcttttcaacttcagcagttgaagtcttaattgcatcgttgtaacgagctacttcagcttcaacatcagcaattgaagatttagagaatgaaagatcaggctccacaagaagatatgctggagcaatagcgataccatcacttgcagcaattccttttaaagtcttggtcattattcagctaaaccttcttttttcatagtgtcggcaattgcgtccaatgcgtccttttcgtcatcaccttcagcagtgatagtaacatcagcattttgaccaacaccaagtgacataacacccatgattgacttcaagtttactgacttaccgttgtattccaagttaacatctgagccaaactttgaagcagcttgtactaaaagagtagctggacgtgcatgaatacctgtttctgcaatgatatgaaaatcgcgtttttccattataaatatctcctttaaattgaaaaattaaactggtaataaatacccattcgagtattagattatcatgtttttacagattagacaactgcaatgtaacagtttacattatttattcatcggtattcgtagcggtatacacaatcgcgccgcctctttctgccctaccggtaatatattgtctttttccataatttctaatagtcttttgaagatcaaacgcatcttttggctcaactttatactcttttatctcgcctgagactaattgatctagaattttctgataatccaaaaatatcaccactcttttaaaattttataatttttccactattaattctactcgtattatataaattaaatcgtattatataaattaaatcagtgataatgattattcttttagtttgtttattcgatcatcagatgctagtctctaattgtcattgaccttggtcaattggtataggttgtttccttctgtagctttgactacttttttagtctgccgcccaagcagttttactaatgacttactcacatgctgtatcgattctggctattactgattcagagcagattcagtcgcagctttttagcttgaacctatgaatacttatattttgcgagattgtcttagaatctgtaattagggactaacatgtgatgatcgatctatgaccaaatatttgctagaaaggaggccattctcaatgaaactttttatcggaattgacgttagttcaaaagatcttcaagtcgctattactgactcagaaaattatcaaaaacctttacttaaccaatctttttctaatgacctgattggtgctaatgaggtcaaaaagataattcttcaacttgctaaacagaacagctatgacaaagtaattatcggcatggaagccacttcaatctatagctttcaccctgcttatttctttgccaatgacgaagatttacaaaaaattaatcttgaaactgatgtcattaatcctaaaaacactaaacgatttcatgacgtttacgaagaaaataagaatgatcctactgatgcctattacatcgctgaatacttacgctttggtaaataccatgtcactattgctcggcaagaggaatacttagctttacagcgtttaactagagctagatatgaaatcacatcttcgctcactagagctaagcagcacttcattgaaactctttattatcgtgtaaacaaactagttaccgttgacaaagacaatattaaaacttctatctttggcgcaacgatgctgtcaattgttactgatagtaaaaccatcgatgaaatcgctgaaatgccaatcgaggatctaattgactaccttcaaaccaaaggacgtggccgcttctctgatccagagactttagctaaagcgatcagaaaagccgttagaggatcatatcgcttaggtaaagtcatgaaagactcgattgatgccgtattatctgtttactatgccgaaattaaaactaatcagaaattgattaagaacttagataaagcaattacagatatcgtccaaacgcttcctgaagagagaatactacaatctattccaggaattgggtcagtttattccgctggtattatcgctgaaatcggcagtattgaccgctttgacactgaagcacagctagctaaatacgctggtctagcttggcgtcaaaagcaatctagtaattttgatagcgaacacaaaccgatgactaaaaacggaaatcattatctaagatattatttggttgaagctgccaacctgattagacaaagagatcccgtttttcggaagtactatcaaaagaaatacgatgaagctttctattctccgcataaacgcgcttgcgttctttgtgcaagaaaattaaccaggaccattttcactctgctcaaaaatggtcaaatctatcaaacaccgaggtgattaattggtctaaaacatttttggaggagtaaataatagttgttaaaaaatcccttgaaatagggcttagtttcatgcacgcaaattttggttttaaaacaaactaattaaaaataaaatttaacttttacattgacttattaccacatgactatttatattcaattttcaaaaatattaatattttgtttgcggtaacaaaagtatttcttacaaaaaataagtgtttgagtcttagcacttgactaccaagagtgctaataatataattttggtacagttgaaaagaaaggcggtactatattttgctttgccaaaattgtcatgagcggcccgcttctattcaccttttcactaaggttaatggccaaagccgcgaaatagatttatgtcaacactgttatcaagaattaaaaaatcaacaaggaaatcaaggaaaaatgaataataatgaattttttggcgactttgatgatttattcaacgcattaaacggaaataacaacaatgccgcaaacaataataatgaaatgagaaataacgaccctagaatgcaaatggggggaggcgctggtaatggtggtcaaaacggcagaagcctacttgaccaatacggaacagacttaactgcccttgctaaaaaaggcaaaattgacccagtaatcggtcgtgataaagagattgctcgggttatcgaaattttaaatagaagaactaagaacaaccctgttttaatcggtgaagcaggtgttggtaagactgccgttgtcgaaggcttagctcaagaaatcgtagatggatcagtaccagcaaaattgcagaacaaacgaattatttcattaaatgttgtttcacttgttcaaggtaccggtattcgtggtcaatttgaacaaagaatggaacaattaattaaagaattacaacaaaacgacgatatcattctttttattgatgaaattcacgaaatcgttggtgccggtaatgctgaaggtggcatggatgccggtaacattattaagccagctttggctcgtggcgaattgcaattagttggtgctactaccatcaaagaataccgcgatattgaaaaagactctgctttagctagacgttttcaaccagttgaagttaaagaaccttcaattgacgaaacaattcgcatcttaaaaggtattcaaaaacgctacgaagactatcaccatgttcactacactgatgaagccattgaagctgccgcaaaactttcagcacgttatattcaagatagatttttaccagacaaggctattgaccttcttgatgaagcaggttctagaatgaacttaaccattccttatattgataaggataaaatgcaagaaagaattaatgccgcagagcaattgaaggaagaagccttaaaaaacgaagattacgaaaaagcagcctactaccgtgatcaaattgaaaaatatgaaaaggttaaagatcaaaaggtagatcctgacaagtcccctgttattactgataagatcatggacaagatcgtagaagaaaaaacaggcattcctgttggtgatattcaaaagcaagaagaaaaccaactgcaaaatctagctgctgatttaaaggctcacgttatcggccaagacaaggctgttgaaaaagtagctcgtgccattcgtcgtaaccgaatcggtttcaacaagtcaggccgtccaattggttcattcctcttcgttggtccaactggtgtcggtaaaactgagttagctaagcaactggctaagcaaatgtttggctcagaagatgcaatgattcgtttcgatatgtctgaatacatggaacaatactcagtttccaaattaattggttctgctccaggttacgtaggctacgaagaagctggtcaattaactgaacaagttagacacaacccatatagtttgatcttgcttgatgaaattgaaaaagctcacccagatgttttgaacctcttcttgcaaattcttgacgatggtcgtttaactgactcacaaggtagaacagtttcattcaaggataccatcattattatgacttctaatgcaggacaaggcattaagaacgctagcgttggctttacagcagaaaacgaagatgaagctaatgaatctgctagaaataatatgagccaattctttaagccagaatttttgaaccgtcttgatgatgtaatcgaatttaatgaattgactaagccagacttgcttaagattgttgacttaatgttgcaaaataccaacaatatggttaaggatcaaggcctacacattgatgtaactgctgctgcaaaagataaattagttgaagatggctttaatcctgccttaggtgctcgtcctcttcgtcgtaccatccaagaagagattgaggataatgtggctgatttcaaacttgatcatgcacaggctaagaatttaaaagccgatgttgttgatggtaaaattgtaatcagtgatgaagcaaataatgaataggatttaataaaagacaaagtccaagttataccaaaagatttcgaagcaatattcgaaatcttttttcttaaaaataaaaatatgctactcaatttgaggtatactaaattagaagaagtaaagctaacagaaacaggtgaattccatgcatttaattgatgtaaccaataattactctgatttggttcacagtcagctcaacactaccgatgcaaactatgttaaagtttattctcttggtaatacttcagttatttatactgaaagtaaggattctatcggtattgcacttgaaaaccatgaccgtcgtgttcgcgaagatgagattgaattcgtaatcaagcgtttaattaaagattatgattcttcatacactttgactgtagacaagagtcgtcatgtaatcgaaattcacgttgacaagtaatccaaatattgttgtatcaaaaaaggaggattgattcattcaattctcctttttctttttgctttaaagtttttctgttaattcaacatctggatatttgtcatggaagaaacgttccgcaaattcattttcaaataagaataatggattaccataacggtccttaactaataagttacgagtattagacatgcgtgggtcaagctgttccggatcaatccagcgcgcaacacgatgaccaatactgttcatttcaacttcagaattatattcattcttcattctgaattggaacacttcaaactgcaattgaccaacagcaccaagaatatactcatccgtttgataattgcggtaaagctgaattgcaccttcttggactagctggttcatccccttatggaatgatttttgcttcatcacgttcttagcagttactcgcataaataattcaggtgtaaattctggtaatggtggataaacaatcttgcgcttaccagcataaatactgtcaccaatttgaaaattaccagtatcgtataagccaactatatcgccagctaccgcatcagaaacttgtactcgctcgcttgacatgaattcagtcgcattatttaaacgaattggcttatcagttctagctaaagttacgtccaagcctttcttgaattcaccagaaccgactctaacaaaggcgattcggtcacggtgatgaggattcatattagcctgaatcttgaagacaaagcctgaaaattctggatcttctggacttagctcctcatccccattaactgtgtgactctctggtgctggagccaaatcaacaaagctgttcaagaatgtctcaaccccaaaattggtcaaagctgagccaaagaagacaggagtttgatcacccatagcaatcttctcgcggtcaaacttgttcccagcttctttaatcaaatcaatttcatccagagtatcctggaattgaggatcttgactaagtggctcactatcaggcaacttaccatcttgatctaatggtaaaaagcgatcttgatcatttttgcggtaaagctcaacacgattattagcgatgtcatatagaccctttaaagtttgacctgaaccaattggccagtccattgctacaccctcgataccaagcaaatcttccaattccgcaattaaatctaatggtggacgtccatcacgatcaagcttgttcataaacgtgaaaattggaataccacgttgcttaacaaccttaaacaacttctttgtctgtggctcgatacctttagcagagtcaattaccatgacagctgagtcaacggccattaatgtacggtaagtatcttctgagaagtcctggtgtcctggcgtatccaaaatattgatacgtttgccttgatattcaaactgcataaccgaactagtaacagaaatcccacgcttcttttcgatttccatccagtcactagtagcaaaattgccagttttacgtgccttaaccgtacctgctttacgaattaccccaccaaacaaaagcatttgttcagtaatcgttgtcttacctgcatcggggtgagaaataattgcaaatgttcttctcttttttactttatctgctaactctttgtccattagtcctcgctatcttcttccttttttgattcatcaatcgttaataataccgtcaacaagcgtgaccccttcatccttctagtggtcaaagtcatcccatcaccaatatcaactgttaacttttctcccttagctggaatcacttttaaagtattgatcacatagcctgctatcgtatcaacatcttccatttgaagattagtaccaaattgctcattaaaatcatctaatggcatcttaccgtaaataatgtacttatttgtagctatttgattaaaaagaatctcagtgtgatcaacctcatcatcaatatcgcccacaatctcttcaaccaaatcttcaattgtagctaatccagttacaccgccatattcatctgtcaaaattgctaattgtcgttgcgtttgctgcatttccatcaacaaatcgcccagctcggcagtttctggtgcaaacagcggctcagtcatgacatctttatagtcaagattatcaaaacccttttgtttagcctttcgtaaaaccgttctgatatgaataatccctacaatcttatccttatcacgttgataaacgggaattctagaatatggctcacgaaggatttcatctagattgtcttgaaaactgacttctcgatcaaccatgaaagcatccgttctaggtaccattacttcacgggctgtcttaccctgaaagtccaaaataccttctagcattgaaaattctgtatcatcaattttatgactttcatgtaaagtaacaatttctttttctaaatgatctttagtccccacttttttatcgccggataatctattttttaagcgaccaaacagagttcccgctccaggatcactattcattttcgtactctctttcttaaaaaagttatctaaatatagctattatagcatagagccaataacaattatgttaaaatagcacataagactaggaggttcgtcatgaaaaaaagtcatgtcttactcgtttttacatttcttttgctaattccctatatctgtagcttagctattattggaatcggctataatgcattagttttacattcagctgaactttatcgcacattaatcggctcattagttggcgcaatcattatgtttgctgtcaaggctactattcaacggcctgttgatttattagctgttcaaaccaacgatggcttactgaagcagcttttacgtttcttcagtatcagacggcgctactggcttttagcagctaatattatcttagactttgttctttgctttgctgctacctacataatacgtgctcttttaacacttgatcaaatcgtaggcggctccatcggctttgttttgttaatcatgtttgtttcaacttgtcttggcgcttatgttgaatacgataacctgtcaatcgaccctgagcagcattaattacttgctggccttcaagtacattacttgggccagtttttttgtatccatgtcaagatcccaagtaatatatggcgtgtcactgtcacccaaattttcatgtacttcaattccgctagcaactacttttttggcaaaatttggcacggtactagtcaacggtaagttgaaaaagactaaagtttgattctcttctacttcctccgctacctctgcagctggtaattcaaacttcattaaacccgttggcacttcatcttttgctacatctgctaaaacgccataccaatacataaagctgtcctcacctgataccactaggacagaacgcttattttctaaattatgatcagctaaaaatttttgaaaagtttcatcattttccatttgctgattagcttccataaagctcttttgagcattcatcaaaccagctggaaatggacgaccaataaataatcttgattcaatatttttcttcattttttctcctaatattctactaattcgtctaaatcaattatttcaccgtttaaaaaggcatcaatctcacctgatgaaaaaccgtgactaaacaaatatttttttattttaaaattgcgttcaatttctggaagatttctaaaacgcttgtaagccttaattccttgtttcttcaaagcttctgtttgtgcattctcatcttctttaagatccattgcatcaataataacgttactaatcccgctatcaaagccatgcgttaataatttagtacgcatcttacgctctaattcacgttgtgaaatcttgccaacttgatggctcatcgacttaatcacgcgttggcccacttcgagccaatcttcttcatcaatttcatctaacttatcctgactaatttcaggatcaacgcctttttgcgtcaactttcgtaataaaattttagggccatcagagccaacacgcaaatcatttttgataaacagcttggcatattgacgatcatcaagatagcctaattcattcaattgactaacagcactattggctgcttcatcagagatttcgtgtttttttaaatattgcagcacctcaaagatggtccgaggctcgtaactcaaaaaatgagccgctaaatcactagccttagcatcagcatcaaattgcctaatcttttcaacctgctcatcatttaattctttacctttaagcagcacaaattctgccaacgttttctctccggcagaaaaagcatattttccatcaataaaaacattatagcgacctggccgtttttgtgcacttactttggttatgatcaacttgtttcacctcgcatatttttctacatccatgctagcaaattttgctaaagcttgctaagaactttttccaggtagtacaattaattgaacacaatttagtttttagtagaaagaattaacgatgaacagaaaatttacccataataaaccaaaacatgaaaaagacgtcatcatcactattaaacgtttaggaattaatggtgaaggaattggttactacaagaaaaagattatcttcattcctggtgccttgccagacgaagtagtagttgccaagattgttaaatcatatccacactacatccaaggcgaactggttagaattaaagaaaaaagtccagatcgcgtagacttccctgaaggtgttgatcccgagattggtggcttagaattagtgcacttgtcttacgacaaacaacttgaattcaagaagaacaatatgcttgaatcattacgcaagtaccatcctcgtaattacaataagtataaagttaaaaatactatcgctgctcctgacccatggcattatcgcaacaaggctcaatatcaaattgaaaaagatcatggtcaacttaagcttggactttttgctccaaattcccaccgcttgattgacttaccaaagatgccaactcaaagtgaagatacacaaaaaacggaacgtaaaatcaaggttttaattgaaaaattgcatgttcctgttgccaactatcgtcgtcatttacctggcattaagaccgtagttgtccgtcaatcagaagcaactaaggaaatccaggtaaccttgatttcgatcggccacaagattaagaacttaatccctcttgctaaagaaattatgaaacttggtcatgtagtttctgtctatcagaatgaaaccgaatggcagaatccacaagtttggggaaataaaaccgaaaagcttttgggcaagaatcaaatcaccgaagaaatcttaggtaaaaaattcgccttatcaccacgtgccttcttccaattgaacccagttcaaaccatcaatctttactcagaagcattgaaatacttagacctaacccccgatcaaaccttgattgatgcctatagtggtgttggtaccttaggtattttggcagctgaccgcgttaagcaagttgttggaatcgaaaccattccagaggcagtcaaagacgcacaacataatgtcgagcttaaccacatcaaaaacgctgattatattcaaggcagtgttgaaaaggttttgccagaattacaaaatagtggtgttgcaatcaatgctttaatcgtagacccaccaagaatgggcttagctaaaagcttgatcaaaaccctcttgcgggttaaacctgaaacttttgtctacatctcatgtaatccctcaaccttagctcaagacttagttttacttagcgaggcatatgatgttcgggtcatccaaaatgtagacatgttaccacaaaccccacgctgtgaggcaattgctaagttagtgctcagaaaagatagataaatccaacaacctagtcttgggctaggttgtttttgtatataaaaaagcggctactggacaatcctgtcccttagtagccgcaatttcaagtggatgaggtagctcatcaattgatagtcacgatttttagttgtttggtatgtatttaaacaatggcattatcgcaaccaatattaacattcacttgttcgggtctttacataaaatgtaacttttaataaattggagtttttgcgaacagccaatgataattaatcaaataatttttaattaagctatttatggctgacacctctacgtatagagaatctttcaagtttccaataataatacaattctggagataaaaacttacttatatttttttatagttgttaacttttatttctacctcttccacactattcattatatctagttgtgaaaccgtttacaagaactaacccatatatttttgcaaaaatctttctacttgttgtcgatattgctttggatacattggataagacaaagcatgccctgcaagtggcgcaagccaaatttgcttttgagcagctgttgccgcataattttgccagaccatcttagttggcacaaagtgatccttgccgccatgaataaataaaaatggtcgcgtatttttatttaactgagcaaccgcagaagcatcttttaaataaaagccatttttcactctattaattccactaaccaaatcaactattggaaaccgtggaaaagccttcatatgaaataaattttgagcttgatagttaatttcacctttcacggttgaataaccacaatcttcaataaaagctttcacttgtggtggcaaaagcataccgcttaccatcattgccgttgcaccacccatgctttgacccataattacaattttggcatttgtaccagtttgatcaattacttgatagatccaacgcaaaatatcatctttttcagcccagccatagccgatatacttaccttcgctgcgcccttgggcacgtgcgtctggaacgagaacattataaccaaaatcataaaacattttggcaaaaccagccatactatctccatcactcataaagccatgtaataaaattgcggttttttggcatgtttatcaaggtactgggcgaacaaagttatgccgctatcagtttttaaagtccatgttttcttagaaaaatctctaaaccaaaccttatcacgataaagtggatccttgcctgataattctttggagtcagcttttttattaaacggtgtcatcgccatcttgaaaaagtactcgcttgccgcaaacaagccagctccagcaattaatgcggaagacaataatagtttctttttcatcttttaacacttccaaattcaattatttcacttttcattttataattaaattgctgaaaatttacaatccttatgacttaattatactgaaaaatgcgcttaacagacttgcttcaattaatcgatgacctgaacctgaatactaaattttatctaaagcatgatgacaaactacttaagtggggaaaactcactattgccgaaggaaaatgtctgctgctacccgggcaaacagcaatgaccaaacaaaaattgattaaattagttggccgcatgcgtggtcgcggcatccccttgttaatggtcattgaccaaaaagaatattccattttcggcctacagattcgcgaagatactggacaagcaattttaatgtaaaaagtgtctgggaaaaaactaagtctcagatcatgaaaaaagaacgttgaatttttgtttcaacgctctttttgtatacttttagctccagccttgatattattaaatcatcacaaaataaaaacaaaaaggtggaaactaacatgtacaagaattatatcacaggtcaaactgctttaacacttaatctagattttgccattccggccaatcatttggctaatgtcatcagctggtttgtagattcaattccagaagatgttttagtaggcaagactgctaaaacgggccgcccagcctatcatccagccatgatgctcaaaatactgctttttgcttactccagaagagttttttctggcagaaagattgagttgatgctggaagaaaatctgccaatgatgatcttggctgaccagcaaaagatttcatatcatactatcaataattttagatcaagcagccatgccaatgaactgattaaaaagagctttatctacttcactaacctgttagaagatgaaggcttaatcaatgaaggtgctgcttttatcgatggtactaagattgaagctgatgctaaccgctatacatttgtctggcgcaaagcggttgaaaagtatcatgaaaagctgaaaggccaggcagttgaactttatgatgaattgattactaaagaagtagtcaaagaaatggaaaaagaaaaagttcaaactagtcaggggctaaaggaattagctcaagaaactgaagcagaaattaacaagctgactaaagagattgagcaggaaaacaaagccattcctggcggttcacctcgaaaagccaagcgacgtggactaaaaaagattctgcaccggctaagaaaagattatgtgccaagaatgcaaaaatatgaagaagccgaagagatctttgccggacgcaacagttattccaaaacagatcatgacgccacctttatgcatatgaaggaagaccacatgaaaaatggtcaattaaagcctggctacaatattcaagcagtcacgaccgatcaatatgtagttgattatgccatctttcctaatccgacagatttcaaaactttggagccggttttggatcaaatgaccgtgttggacaagtttgacaaaatcgtcgccgatgctggctatggcagtgaatacaattattcgatgctggaggaaaaatatccagacaagaagtactttattccctacactatgtatgaaaaagaacagaccaaaaagtataagaatgatccaactaagctaatcaactggtactacaatgaaaaagatgattattacattgatcatcatggcgtcagattcaatttcaaatattacagccagcgcaaggatcgttctactggtcaggtccgtgattttaaggtttatgaggcagacgagttccagctaacgccagaattggaacaattggctaaaacagctagcggccgccagcgccaagttcgctataatcctaactggcaatatttaaaagaaaaagcaaaagaagttctccaaagcgaagaaggcagacacatctatggcatgagaaaatatgatgtagagccagttttcggacatttgaagaacgtatttggcatgcgcagaacgcacctgcgaggtaaagagaaggtcgaaaccgatatcggaattgcctttatgatgatgaatttgaacaaatattgtcaaagaaggtggctgaagggccgatttttattgttaaaaattttaaagagaacaaaaaaacgatcaagattcttaaaaaaggaaatcttgatcgtttttattcatctggaagctagttttttcccagacactttcttattcttttacgcggtattgacgaatatgatccttagtaccagcaaaataccaagtacctacttcatcgtcgctagttaattctaagccatcctcaggatctaacaaagccgtattgaagacgtcttcatattgcttaactgtcagcttcttccgccgatcaagcattgcttgatcagctgtaggatcaacttgtttttcatatccttcaaccaacttgccactataaaactcagccattgcacctgaaccatatgaaaacaggccaattaatgagccagcaggtaattcaccattctctagcaaactaagtaaactcatataaagtgaagcggtgtagatattacctactcggcttgataattgtttagcagccgcaaaactacgctccaacttgatcattgttgcttgatcttgcccctcaatcgcaatattattagcttttaagcccatcttagtaaaaggtaaatgataagtaattgcatcaaaatcactagtctttaatcctttttgcttcttataatcagtaaaggtcttcttgaagaaatccaagtaaacttgagtcgaatacttgccgtcaactaaagcggtgcgagaataatttggtctccagaagtcgttaatatcttcgctgtaagctgaatgaccattatttagggctaaaatgcttgggtcagctttgatgagcattgccacgctaccggctccttgtgttacctcaccagcagtattaacaccatagcgagcaatatcactaccgatgacaattgcggtttgttcaggatgtacccgaacaaaatcacgtgccatcattaaggatgccgttaaaccaaagcaagcttcctttacttcaaaagttcttacttctggcttcaactttaaggctgtttttacaaataaagaagctgactttgattgatcaatactactttcagtcccaaaaattaatagaccaactttgttcttatcaatcttgtcaataaactttaaagtcgcattaattcccattgaaactgcatcttgcgtaatatccgcaacactcatctctctttgaccaatgccaactaaaaacttattttgatcttgctttcttgcgttcgccaaatcgaccatatcaacgtacttgtctggcgtaaaaagtccaatttgatcaatacctacttgcattatttttgctaaaagctccttagcatgactttcagaataatttttttcactaatcatcgcagctagtagctgcttgcgctcatgttcattatcggttaactcagcaaccacatttctcgcctgcagtttcatatgtcctgcttgaatgccaacagtagaaattgccagcaaagctgctaggttgttggctaaagccacgctaacaataatctcagctagagttttactcgtgattttttgtcctaaaatagcaaaactttgttggacgtcatgacgggccttaattgagccaccaactactccgatcgccattggcaacgttaattcgccaactaaataactaccctgcatcgtccactttgataaactgcgatattggccatcatgattggctaaaactgcagtggctgcttcaattgcccgataatcattgcctgtggcgattaagacggcgtcggctccattcatgattcccttattgttagttaccgcacgataaggatcgtcaattccaatttttcctaatagagcaacacgttgtgcaacttgcatcccaccaatcgtttgtggatcaatcttcactttagccgtggccaattggctaggataatttgataaaatcgcaaataatttttcatcaacaccagcataattttctaatttagccgctaaaaattccaaaatcgagttggttttattcgcgcccatcgcctcagctggatcaaccaatacttttaagtaaagcaaatcctctttctgcacagcagttatttttctagtaccaccaccatgacggactaagctggaaaacttttgattagctaattcgactaagtgcggaaattctttttctaattcaattaatgaaaaagaattgttgaccttcaaaacgatttgaccataaatcccttgtcggtcgctgctagctgtcacaccaccatttctagcaaagatactagctccatgattggcggcagcaactactgagggttcttcaacagccattggcacccaatatttttgtccattgactattaagttttgtactacgcctaaaggcaaacgcaactgccctacaacattttcactcaattcatctagacgtctcagaaccgcatcatcgatttgctctaatgcaataccttcatcctgcaataatttacgtctagcttcaggctctaattgataaaatttcattctgcattctcgatttcataagcaatcgcctgaccgccaccaatacacaaagtaaccagggcacgtctgccttttctcttctttaatccactaattgcactagcaactaagcgtgtacccgttgcacctaaaggatgacctaacgcgattgcgccacccataatattcaatttatcagttggaatttgtaagtcgcgagctaccgctacactttgggctgcaaaggcttcatttaattcgataatatcatagtcatcaaaattacgccccgtcttcttaagcagttttttaactgcataatatggagtataacccatcagtgcaggatcaaagccagcttccgcaaattcacctaacttggcaatttgcgttaagcctaactctttcattttctccttagttgccagaactaacatacttgcaccatcagtcaaaggagacgagtttccggcagtcacttcaccatccgccttaaaaacaggctttaagttactcaatgcctcaagcgttgtatccggacgaattggttcatcatgatctaaactttgaccatcaatctccacatccaggatctcattatcaaaaaatccggatttaactgctacagctgcctttttatgcgactgcaatgcaaattcatccatatcctgacgactaacatgatatttttctgctacgttttcggcagtaattcccatatgcttgccagaaaaagcatccatcaaaccatcgttaagcatagtacttactaggtgatctgctggatcatttttgttttcttttttaacaaaataaggcgcattagtcatgctctcactaccgccgacagctactagatccaaatcgcctagttccatctgtccttgagctagacgtaaagctttcagacttgagccgcagacttcattaattgtaacggctgcagaagcttcactcatccctgaatgtaaggcaacttggcgagccatattctcacctaagccggtatccaaaacattccccataaacagtgcttgaacatcagctggcttaatattgcccgccttcattgttcctttcaaggccattacacccaaatcaattgcagaagcatccttaaaaaatcctcggtacttgccaaaaggtgttcttttagctgcaacaatataaatgtccttcatatattttctctccattctccataatgtgtattttttaacaaatatgataatagcaaaaaaatattaagaaaaacataaaaagactacgccgcagcgtagtctccctaataattaagcttattttttattttgcttaccttcagcttcaaacttcttgctcaattgcatgatatatgcccgcaattgttccttaatttctgggtgcttcaaaccatattcaattgaagtttcaaggtagccttctttgttaccaacatcatgacgttcgcctttaaaggcatgagcaaagacacgttgagtcttgttcattgtatcaatcgcatcagtcaattgaatttcaccgccacgacctggtttttggttagccaaaatatcaaaaatttcaggtgttaataagtaacgaccaataatggcataatcactaggtgctttatcaatatcaggcttttcaacgaatgacttaacattgatcagtcctggcatgatctcattttccggttcgatgacaccatacttagaaacttcttcatgtggcacaggcataactgcaattgtagaagcatgcgtcttgttatagcgatcgatcaattgcttggtcaatggcaccttatcttccattaagtcgtcgcccaacataactacaaatggttcatccccaacaaaactgcgagcacggaagatggcgtctcctaaacctgctggatgcggttgacgagtgtaatacaagttaacgcctaaatcagtaattccttcggttaggcgaagcaattcttttttacccttttcttccaaatcttgttctagttctggattagaatcaaagtgatcttcaattgggcgtttgttcttgccaattacaattaaaatatcttcgattcctgactttttagcctcttcaacgataaactgaattgttggtttatcaacgataggtaacatttccttaggtaaagccttagttgcaggtaaaaatctagtacccaaaccagctgatgggataacggcttttcttactttcataaaagcacactttctatttcaattttataagttcatcataacaaaatatgcatttttcagctacttagtttttcgtcttttcttttgaatataactggcaatacgaccagcagaatattcaacttgtccaacacggtttcgcacaatagcagcgttaacaccaacgccaaataaaaataatactgctgcaatattcaaccagagcataaagatgataaacgtaccaacaatgccataattctcccaagtaatcgggaaatggtgtaaatagaaactaaaaagaaatgatagggctaaccagcctacaacagttacaaaaactcctggccaaattactctctttttgagttttatattaggcaaaacatagttcaaataccataatgctagcatcataaccaatattaatactggatagcgataactaaagattttgctaatttcattaagtggtagctgaaaaatcggtcctaaaaagttgagtacttgttgcccaaaaaccaaggccaatgtagcaattgtaaatactagaatcatcaatcctgtaaaaacaaaagtaatagttctagtccaaagaaaattaagcattgataattttaattcaacttgatgaaccccataaagtctattttctccaagacgaattgcattaaccatatttgataatgaccaaactgcaaacacaataccaaaagaaatatagcctgttgatgtcgttttcaataaagaatttataattggcataatgaattttgacacttggtctggaaaaaccaagttcaaatattcagcaataggcgcagtatcaatgtgaaacaacggtaacacgttaccaatgataataataatcggaaaaatagaaaacaaaatgtagtaggcaataataattgaactagcaaatatctctccttgagataaggtggttcgtaatgtagaaataaattgcccaatttttaaaccaaaatggtttttaccatttttcatccattatcctaatcatccatctcatcaaagtgagggatgtacttttctaagccatcgtaaggatgctgcagggtcaagatcttaggaccatcttttgtaattgcaaaggtgtgttcaaattgagcagcattagaaccatctggagttgcgtagtaaacccaatcatcgttaggatcatcaacagtacgttggtcgatgtgccagtcgccaccagcttctaccataggttcacaagtaatagtcatgccttcacgcaagcgaagaccatgacctgccttgccccagtgaggaacttctggatcttcatgaattgatggttgaataccgtggccaattaattcacgtacatcaccgtaatgattttcatcttcaacataatgttggatagcagcaccgatatcaccaattctgttacctaaaacagcttggtcaattccgagatacattgcttttttggttacttcaattaatttcttatcagcttcggaaatttcgccaactggataagtagtacatgaatctgattcataaccgttcaagttgcaagttacatcaaccttaacgatatcgccttcctttaagatgcgatcttttcttggagtttggtgggcaatttcatcgttaaccgaaatacaagtaccatacttataaccctcaaaaccttgttctgaaaggcggccgccacgacttgatacgaagtcttgacaaaactcttcaattttccaggtagaaatgcctggcttaatcacatcacgtaagccttcaaacatagttgcaagaagatgtcctgaagcttgcatgcctttaagttcacgaattgatttaattgtaatcaaaataatttctcctttataaatttttatttagtttcagatatttctattataccgttttccaaaatacttttaaaaggtcgggtttttgtagaatcaaaacaaaactctagaaatacctgaaatatttttaaagtttgctaaaactaaacgtttttgcaatagtttcatgtataataaggtgtcgtataatgcagtgaaaggtatgaaaaatcatgaaagcaagaattgtttatgccagcatgactggtaacgatgaagacatggctgatattttagaagaagatcttcaagattatggctttgacgttgaaacaagtgatgtcggcttcactgatgccaatgactacttagatagtgatctttgcatttttatcacctacacctatggtgaaggcgtaatgactgatgaattggcagacttttatggggagttaaaagacttagatctaacaggcaaacattttgctgtgatgggttctggcgataagacctacggtgaacacttttgtgaaaatgtttttgactatgaaaaagcattcaaggattgcggcgcaactgaaattactaaacccgtaacaattgaaaatgcgccagatgatgatgcagtcgctgcaatcgatcaagctgcaaaggaaatggccgataagttaaatggctaataacaaaaaagacgtcacagctgttgatcaggcacaaatacgccgtctaggtcaaaaattaatcaagcgacaccgtaatctttgggtttacatggttttcggctttgtcgctgcattaatcaataccttagtcttcatggtcttacactcatggtggcataatgtgatggtaatttctaacaccatcgccttcatcgtctccaacctggcatctttctggtttaaccaaaaggctgtttttatcaataatgtcgatcatgaacacagcacgtggcataaactaatcgtctttttcacttatcgcgtcatcagtttaatccctgatacattaattatgttagtcggcttatcctggctgcatttaaacgcattactagtcaaaattatcgaccaaattttagtcggtgtattcaattacttaactactagatcagtctttcaaaagcaagaacatactatgattgaacgtgcaaaaatgcgcattcaagaaccaaaaaataaaagagacagcaaaaattaaacaatgtcattaagttaagacattgacaaattatcgacttggacttttaagatcattcatttgcgatttatcgcatttgaatgctcttttttcatgccaaataaacccaaatcttgtttagaaattaggctacacgatataaataatatacagctgatttgggtttgagatttcttttgtcttttcgtcctggtctgatcggaattgtgtaatgactaatttgaataagaatctttttaaagatttcagttgaagaagaaattatatacatagcctggatgacaaaacatgactgtttgaaattgatcgcatattgatacttgcattttttttgtggtacatatgcttgagcatcaatttgactgactgcgttaaacataatcatgtgggcatagatctccatttcaataaatctatcctgcttggaatgaaactgtacgctacctaaagcatatttcaactttttgaatgaagtttcaatgccccagcgcaaatggtagatttctttgatcctttttaagggataatcggctctatttagattagttagaacaacttcccattcttctttgcctgatttaggatcattaattctaaatttacaggcacgaaattttattgtacataactctccaaagtcccagctgccatctttggtatttttagaccgatattttatatattgacggtaatgatggttaaccaaatgaacgttttctgtagccttatgggtttcataataataattagaggtagtcacccagcaagctatatccttatcacactcttgattaggcaactcagctacttccttaaatgcgccatatcccgttttagtacgtatgacataataacagttaggcaggcgattacaattttcaatcatgttaaagccggtataacctcgatccatagtaactatatatggtccgcaatttagctttttaagcatttgaacggcggctttacgttcatccatctttgacttaggctgaaagatgcagtcttgataagtattatttaacaggtcatagagtgcattaacatgaatttggcaatatggctttcctttatgattgagatttccaacgatattctctgatttaggattccagatttgattaaaatcagacccatcaatggcaaatatacgatatttatgatcaaataactggatattaaataaattctgattaaatacagttagaatatgcttaaaacatgcgggtgaaagctgacctttgcgttggacataagcggaagtactgactactttatcgttatttttaatagctttttggccaaaagctctaaacaactcactggtcaaatcttttccttgcatattaatagtagttttaatgactgtagctgcatctaaaaaccgcttcctagtgaaggcatgaggatcatcgataaaatcatgaatatgctttccagtatcattgataatttgatcaagacgatctaaaatatttctgtgaagggctttcataattaacaccagctttctggcaataattttgaaggtttaataatttaatcagagggcgaaaaggtaggttcttttcgcctttattttatgcaaaaaaagaaccaaatcataatgattcggttctacagagattagattcaatttgtcaatgtcttaacttaatgacattgaaaaattaaaactgtctctttatttttttactcaaaatcttttggtttactttcactatcttgattaaagtaataataaatatcatccataattcgatcagctgcatgtccatctccatatggatttttggcattcgccatccgatcatattcgtttttgttttctaacaaagctagcatttcttcacgcaccttgtcgacttcagttccaactaacttcaaggtaccggcctttacgccttcaggacgttccgtcgtatcacgtaaaaccaaaactggtttacctaaactaggagcttcttcttgtacgccacctgaatcagtcatgataaagtatgaacgtttagctaagttatggaaatctaccacatcaagcggctcaatcaaatgaatccttggatcaccaccaagcacttcattagccactttttgtactcgtggagataagtgaaccggataaataatttctacatcaggatgcgaatcaattacttgccgcattactttaaatactcggcgcattggctcaccttgattttctcgacggtgcatagtaaccaaaatcaccttattaccaggagtaattgcgtccattacctcatgatgataatcttgttgtacagtctgtgctaaagcatcgattgccgtatttccagtaacgaaaataaaatcagaatggtgattttccttcagtaaattagccttactcaattcggtcggtgcaaaatataaatcggctaaatcatccgtcatctgccgattcatttcttcaggatatggtgaatacttattccaagttctcagacctgcctccacatgtcccaatgtagtttgctgataaaaagtagctaaagaagccgcaaaactagtcgtcgtatcgccgtgaaccaagacaatatctggtttctcttctttgatcaccttagataaatcaatcatcactttagaagtaatttcttctagagtttgattttggtgcataatattaaagtcataatctggtttaattttaaaaatatctagcacttggtccaacatttcgcggtgttgtgcgctaacgaccgttacttcttcaaaacgatcatctttttttagtttcaaaacaagtggtgccatcttgattgcctctggacgcgttccaaaaacagtcattaccttaattttcctcattaaaaaattcctccgcttaactattttactatacctgattttagactatcttgcacccgctttctgtgttttaatggaagtattaaattgaaagttggtcgatgcatgaattcatcattactattattaattacaactggtttaattattttgattggaactttttgccttgtttttggtatggacaaaaacagacccgctaaaactagaaaatatttactttatactgcactaatctgtgttttcctagtttggggcttaattactgcaattatgcttcaacccttaggataataaagataccttttggataaccaaagcatgtaaaaagcctgcaagaccaatacttgcaggcttatttctatgaccccggtgagattcgaactcacctctacggtttaggagaccattgttctatccagatgaactacggggtcaaacctaagattaactttaccaaaaaaagtggtaatagttaacctttttttagaattgtggattaaaaaatgttttcggatggttggtatcagcaatcttatcagctgctttaacaaaaggcatccaaattagcaaagtaacaatcatatttaaaatgcttaaaacaattgcacgccaatcataattgcaagccagaaatgggccaataactggtggcatgatgctaggtactgccacttgaactggattaaccaatcccataatgctaacccaataagaaaaggcaacattaactagtggcgctaatacaaatggaattagatacactggatttagcactacaggcaggcccaagagaattggttcgccaatgttaaaaattcctggagctagtgagattttggcaattgtgcgataatcactgcgtttagaaaacattaaaatcgccacaattagcattaaggttccaccagcaccgccaaaccaggcaaagacatcaaatgagccacgtacccatacatatggtggaatatttccattactaatcgctgtgatgttatcattttgagcagtcatccaaattgaatccaaaattggtgatagaacccctataccattaattccaaaaaaccaaaataactgcactaataaagtaatgacaattaccgtaccaaagccttgtccccactttactaatggagtttgaattgtggtaagcaaccaatttccaaaatatttaccggtaagaatttggaacaaataattaattccgcctacaccaaatattgcaatcattgcaggtaataaagaatcaaaagcagcttgttcagcatggggcaagttcgatgtcacatgcaacataatccttgctttatagcaagcataataaataaaaaagcctaatgagccaaacaaaatagcagtaaagaggccagtagttgagaactgactaatgtcaaatgcattatgcagtgtaacattatcaccatgaaatttaatcttagctatattggcaatgcttagtgcaaaagaagataatgccacaattgaagcagcaagtctatttccttcaaaagcttttgctagttgatagcctaaagccaatgctaagaaaaaggcaaataatgaaaatgttcctcgccaaactaaattactgattgctaccaatggctgtatcgcaaaagcaaaggcataccagcctaaatgatcatgagctgcttcaattaagctcttaattaaaactgctaatgatcctgccattgtaattggcattaatgagacaaatgcatcccgtaaagcaactagccatcttatctgaccccatctactagctagcggcaaaacatagtcctctagccatctaactaaacgaatcatttctttcctttcaagtaatgtggatgatatcccttgttcttattacgtttcttgcgttttttagttttatttttcttagtcgaagtcttaatgggctgctctttagcctgcttcttttccttcttgagtttaggcttttcagttgttaaatgatagcctgcaaagtagacacgctctatttgtaattgatctgccaataatttcttcaaatcacgaaaatcgtgatcatcgcctaaggtaaccacataaccttcagcgttcattcgacctgttcttcctgcccggtgcatgtaagtattagtctcgctcggaatatcaaaattaatcacataggtaaggcctggaatgtccaacccacgcgcagccaaatccgttgctagcagcaatttcgtcttaccagtagctaggtcatttaaggctttttcacggcgttctttaccaaattcattagctaataattcgaacttagtcttagtatgcccaaaaataccagcaaagcgcatcatcgttttatttgaatcaaagaacaaaattcccttaaagtgatccaacttagtcattcgctgcaaaaattcaatcttgtgttgattgtctacttgcaaaaaataatgtttagtcgctgaagcttgttcatttctgacatctactaacaagaaatgacggttaaaaacttgctccgcatcccgtgtaatctcagaatctgttgctccaaataataagatttgactgtctggacccagattttgccctaatgctgataacaattccattttagtaaattctaaaatatcatcggcttcatcaataatcaaagtcttgatctggtttactttaattcgaccacttgagaagaagtcaaaaaaacggcctggtgtagctacgaccacttcaggatgctttttcttcagattgtcttcttgtctctttctattgccagcaccaaccaagctgacgccttttaatcctaaagcgtggatgtaaggattaattgcatgacgaatttgtacagctaattcagtcgttggcgcaataattaccacgctgttagcattacctggctgtgctttttccaaactaggaagtgcataagccaatgtcttacccgtacctgtcttagccaatccaaccaggctcgcaccattgcgaatggcatcatagctttctttttgaattaaagttggctggtccttgtgttctctaattaaaacttgtttgattttttcttgatacattattactgtgttaattgcccatacttttgcttatattgaccaacggtcccgttatacgcgtacatcgttacctggctttctaagcctgaaacattccttacgcgtccgttagtagtgtagcaccaaaatgaatactttaatttattcggtgccttactatctgatgacataaataacgtttgcggattaaagtaatgttgatatttatgatcaactttcaccatgactcttttgccagctgcttgcaataaagccgcaaactgccccattgaccgcaaatatctcgctgaacgagtagtcactgccggtacaattagaattggcagcgagcccgtattttgtcctacttgcttaaaaaaagtagcggtaatgctgcatcggagtcgattcattgctataggaaatctcactaccaaatgccaagttcgttcctaaaatttggtcacgataagacagatagttttcatcaaaatatgatctgccttgggttgctttcaaatatataaaggaaacgccattagattgcaatttatgtaaatcaacatagtcaatatcttgatttaactcaatcccaatcgcacttgaattagcatctggcggtaaagttgtttgccgcttaaaattgaaaaagccaatcaaaagaaatgcaatcgccagaattaataaagtcaaaatcgctggcaaagtatacttatgctgaaatcttttcatcggctaaattcctcccttaattattttaaccgaaaagcctatcaatacaaaaatttccgagactgtaaaatagtttgtgtaaggatgaatgattccttaaatttatttctttaaacattagaaaaaggagttcctttctcgtatgattggtttgaacaaaaaaaacacatacagaaagaagaactccttcatgaatgattttaccaaagattttgctcaagctctattcaatccagacaaaataaatgatttattgcgcaaagagctacaacaggctgttaataacttgctagaagctgagttgactgcctttctaggctatgatccctatgccagaaatggctggaatactggcaattctagaaatggtgcttatttccgcaaggttgatacccagtttggaccaattgaagtgcaagtgcctcgagaccgcaacggtcagtttcatcagcacacgctgcctgactacaagcagcactctgatgttttggaaagcacgattatcaagctctactccaaaggcgtaactaccagagaaatcgctgacttgattgagaaaatgtatggcagtcattatagtccagctcaagtatcaaatatttccaagcagatgctccccaaggttgaggcttatcacaagcgcaagctaagcgacaagtttttctgtgtctatttggatgcgacataccttcctttgcgccgagaaacgtttgagcgtgaagcagtatatattgccattggcattaaacctaatggacataaggaagtcattgactactgcattgctcctagtgagaacattgaagtctggacagagatgcttcaaaacatgaagtccagaggcttgaagcaagttgaactctttctttctgatggtgttgttggcatgaaaacagccttggccaggacttatcctaaagctcattttcaacgctgcctggttcatgtcatgcgcaatatctgtgctaaagtccgggtggatgaccgcgaaaagatcatgaacgaattcaagcagatacatcaacagacaagcaaaaaagaagctgcagctgtcttgcacaaattctatgccagatggaataaagcttatagccatgtcatcaaaggtttgaaggaaattgagcccgatctgctggtcttctacaattatcccaaacaaatcagagcttcaatttattcaaccaatatgattgaatcctttaacaacgtcatcaagcgtaaagctaagcctaaggcagaatttccaactgaacagtcgcttgatgcatttattggcatccaggcaatgagctacaatgaccgctatttcaaccgaattcataaaggctttggtcaggttcaggataccttagaatcttattttgaataaataattaaaaaatcaatttcccggatttaaaattgaagtgcaacactaagtgttaaacaaaaaggccatgaagacctaaacttgaagtgacgaaaaatcaagaaaggaagatcttcatgaccaattcaaattctagcatttctaagcactatcatcaattaaccagcgtacaacgtggacaaattcaagcaatgctggattccggcataacttcccgtactgttatcgctcaagaagttggctgccataagtcgacaatcagtcgcgaaatcaaacgcggaagcgtcctgcaaagagacagcagctatttattgtatgagcactattacgctgatactgcacagatttattatgagaagcgtcgcaaaaactgctatcagcgcaatccattgaagcattatgctgtctttttgagaatgctctccagacgctttaaagctaaatttgatgccaccagcatcgatgagttcgttggtgaattcaaaaggactatgccaggctacccttgtcccagcacaccaaccgtctatcgctatattgatcagggcttgctggacataagcaatattgatctgcctatgaagctcaaaagacgcaggaacaagcgtcatcacagccatggcggtcacgctttgcacaagaagcatcttggcaattccattgaacagcgtcctaaggaggttgaagacagaaaagctccgctgcactgggaaggagatctggttaaaggcgtcagacgcaagaatcagcctgctttaatgactttgactgaaagaaccacacgctttgaagtagttatcaagattcctgactatcgggcaagcacatgccaaaggctgcttcaaaaggagattgacagacatcctgcctggtttaaatcaatcacgtttgacaatggctctgagtttgcggatatgaccaagatcaagggctgccagatttactttgctcacccatattctccatgggaaaggggcaccaatgagaactgcaatggtcttttgcgtcaattcttccctaagggcaagagcatgaaagacaagtcaaaagcttatgttcaacaggcaactgatgccattaaccacaaatatcgccgaatcctccaatatcacacagcagaggaactcttcaagcaatatatctcttcataacctaactgttgcacttaatttgacaattcaggaatcaatgtaattgctgaaagacctaaaataattgcccgtgaaaggtctttttctggatttttgacttcgttagccaaattagtcactacaatccagccttcgaaggcgaataacgcagaaagtaacccttgactaatggcggttggaaatgaatgtccagtgccgactgttaacggaataattggtgcaggtattttggcaggattaaataatccccaaataataattaaagcaattggaatgatttttaggatagtgatgaccgactgcattttgctagaaaatttagttccgattagattaattcctaagagaaaaagcactagcaagatagctattaggttagaatacctcgccttaattccaaataaggagacaaactgaacgccaaaaattgagcttagggcaccaatttgagctggaaaataaacaatcatttgtgcccagccaaaaagaaaaccccacacgcggccgtaagtgtaatcaagatacttaatggcaccattaatttttaagctggcggcaatttctgaaatggtcaaacctgatgcaattgaaatgatcccagctaaaatccatacaaacagggtcattgaagtgctgccagtttgtgcagtaattgttccgatcttgaaaaatacgccagctccgatgacagaaccgactacggtagccaatgcttggccaaatgagatttgtcgtttcatatttatttgttgcccttcgtttacattatttaaattttagcacatcgactggaaatttgaaactgtcaaatcttttgtgtaaatagttctttctcgtaaattgattttttcctgaattgtcaaattaagtgcaacagttaggttatgaagagatatattgcttgaagagtttctctgctgtgtgatattggaggattcggcgatatttgtggttaatggcatcagttgcctgttgaacataagcttttgacttgtctttcatgctcttgctcttagggaagaattgacgcaaaagaccattgcagttctcattggtgcccctttcccatggagaatatgggtgagcaaagtaaatctggcagcccttgatcttggtcatatccgcaaactcagagccattgtcaaacgtgattgatttaaaccaggcaggatgtctgtcaatctccttttgaagcagcctttggcatgtgcttgcccgatagtcaggaatcttgataactacttcaaagcgtgtggttctttcagtcaaagtcattaaagcaggctgattcttgcgtctgacgcctttaaccagatctccttcccagtgcagcggagcttttctgtcttcaatctctttaggacgctgttcaatggaattgccaagatgcttcttgtgcaaagcgtgaccgccatggctgtgatgacgcttgttcctgcgtcttttgagcttcataggcagatcaatattgcttatgtccagcaagccctgatcaatatagcgatagacagttggtgtgctgggacaagggtagcctggcatagtccttttgaattcaccaacgaactcatcgatgctggtggcatcaaatttagctttaaagcgtctggagagcattctcaaaaagacagcataatgcttcaatggattgcgctgatagcagtttttgcgacgcttctcataataaatctgtgcagtatcagcgtaatagtgctcatacaataaatagctgctgtctctttgcaggacacttccgcgtttgatttcgcgactgattgtcgacttatggcagccgacttcttgagcgataacagtacgggaagttatgccggaatccagcattgcttgaatttgtccacgttgtacgctggttaattgatgatagtgcttagaaatgctagaatttgaattggtcataaagatcttcctttcttgatttttcgtcacttcaagtttaggtcttcatggcctttttgtttaacacttagtgttgcacttcaattttaaatccggggagtaaatatatttattaatgttgtgaagcaccgctagttgcatcattttcttgatgatcttcataggcagtattggcagcaattcgaccaaaagtgaaaatatctgccaaggagttaccacccaaacgattaccagcatgaatgccaccagcattttcaccagcagaatatagaccatcaataatttgaccatctttattcaaaacatgtgccttagtatcaattactaagccgcccatagtgtggtgaatagcaggctttctcggagtagcatagaatggtgcaacttcacatttgaggcctaatacattcttatggaagtctggatcctcgccacgatcaacgtaagaattataatcctggatagttttaaccaaaactgctggattcattccaatttgttttgccaaatcttcaagcgtatcagctctaaacaaggttccagccttaacttgcgcatcaagtgactcttgggttgtattgtaagcagtgtccttaatcttatcgtccgcaatttgataaatcaaaccaccattttcgataactgccttagccaaaacatcccgttccgcaaattcattaacaaacctcttaccctttttgttaaccataatatagttagcaggcggagttacaacaccagtgaaaagctcaccggtctttggatcagctactggcattaattggataaagcccataccgaataagtctgcaccagcttcaagacctaagttaatcccatcgccagtaattgcaggtgaattagttgttgtactatcgtactatcgtctgcaatgtttggccaataggtattgtatttttgaaccatcttagtattggcaccaaagccacctgccgttaaaattactgccttagcatgcacagtcaaagtactaccgtcagcgcgtgtcgcaattacaccgcgtactttgccatcttcaataattagtttttcaacacgagtttcaagatatggatcgacaccatgctctcttatccaatcacccaaaacgtgaataaaggcataacctaatggctctactggcttatgacctctgcgccacaaaccaccaactggttctgtaacttgagaattatcaaacttaacacccaaatcttggagccatttaacagaatttaaagcattagttaccaattcatgtaccaaagcatatttaccatgaatttcgttaccttttaaatcagtccttttaccacctaaataagtttgaatttcatggagtaaagtcgaatcaaataaataatctgtaccagaatcaatatattctttgatttgtctttgtaatctttcaaaatcaaagcggtattctaaatcaatttgttcaattggcgtattagccaagtcttctaaagtctgtttttcaccaggaagagccttaaatttactttgccattctggttcagccgcattcattggaccaccagcacggctagtattaccaccgatctgtggatacttttcgagaacagccaccctttcaccatgttgaattgagcgaactgcagctgctagaccagcgccacctgcaccaactacagctacatcaacagtaatttcttcatcttctacctttgtagcagcgggcttttcacggtttttccattcggttgaatcgccgcctgcttcatcaattgcttcggctacgccatcaatcacaccatgactggaaatagtcgcgccactgaccgcatcaacgtttaaagtttgattttccacaattgttttaggcaaacgtctaaatacttcatcggctactcccttagtttcacctgatgaatctactttgattgaagtaactttatcgccatcaatgtcaacttccattggcattgattcggaaccatgacctttagcttttacttgatattttcctgacttcattgcttacacctctaataagtttaattttatccacaagttaatattagtgcgtcatctgttgatgtatcaaatatcaatttcactatactttcataataaaattgttatgagataactatgtttcgttctccaaataaaaaaagcttaatgcaaatagttatccacattaaactttttaattgcatgatttaattaataaactgaaacttgaaagctaagattaacgctccttccccgcgcctcttggctttttcttatcaaaaataaaaacgcaggatctctctgcgttatactttaagtgtcaacctgaaaagtaaaggagatcctacgcaatgaacagtatagaacaaatcgacacagaaaacgataccaaatccttaatttcttcatttattaatctaattggtctagctaagttgactaaacaagtcaactttaagcgtaaatctaccgtttcattaaccatgattatctcttggctgatgtctgtacattttgctcggctttccttattcagagctaagagtgacaagcgtttttccgttagaactgctcgcaatgtacttaacgatggaagaatcaactggcaaaaactattatgcttgattgcagctcggctcattggctgcttcaaacatccgtaaaaagaaacattatctttattcaagcatagttgaggctcaatatcatggacatatctttttattaaagctcgtttttgtctccaaccgtggaaacaagaacaagtatttagttttagctactactcagacaaagcttagacctaaagaaatcatccaactttatggtcgtagatggcaaattgaaacatattttaagacgtataagcaatatcttgctttagataaatctcaagttcaaagctatgatggacaatgtggctatatcgcagttacagcaataacttatgatctattggcctggcaggaaagacaaaatacagatgataagacaatcggagatttattctatctaatgaacgaatccttacctgatattagattcgtagatgcattggtctacttaatttcagaattaaaagagcttaaacagaatagttttgaaaagatagatgaagtaatcaatgactttattaaccaactgccacgattcatacaaattgcactgaaacagatcatataaaaactaattacgtctagaaaagctcaatagtgacaggacttgagcttgattttggtgctttcaagtttcagtatttaaattaagcttcagaggcgcctgatacagcatctgcttcttgttcatttgaaacagtaaaataattataattggtattatccgcagcagtcgtacctgcaacaaaaccagaagcatagctccaagaattcatcatacttggcattgaatcatgaccattagcaccaccaacaatttctcctgcagcatagaagttacttacgggattcatatcattgtcaagaagctgcatttgatcagtagtttcatatccacccaaagttgtgcagaacagaagtttttgttcaattacataatatgtatcgccttcgaactcatgcataaacttcttgtctctaccaaactcaggatcataatctgctttaacatcttcagtatagttatccacagtttccttcagcgtttgataatcaatacctgctttttctgccacggtcttcaagtcgcctttgaccagaactggactcttctcgccaaccaaatcaaagaatgattgaacctcttccttggtaaagccatacttaagcattaattcatagaaacggtcccaggttctttgatccatgacaatgtaagctaccttacccttttgttcagcaatcgcatccctaaaatgcgtataaggtgcagattcgttaactattctcttaccatcagtattaacaaaaatagcccccatatcggtcgcttctttagttgaataagttgttagcttagcaataccaggttcaacttccaatccatgtggatataccttataccagtctaagttacgagtaaccaaattcatatttttggcaaaatcaagataatcaccagttgaagtcattggaccataatatggaatatcagtcttatgagcctgataatcacgtgcaccccaaccaccagcagctaaaacaagtgacttgaaattgacattaattgtctggtgcttgccttcagcggttaaagataccagtttgccagccttatctttattcaacttttcaacacgggcatctaagataatttgtccgccctttttttcaaatgcctcagccaccttagtcactagttcatatgagctttcactaggcatttcaatttgacgatatacactatgttcaactgtttgggtttccgctttttgataagtcaaatttgcaaattcagtaataaagtctactgccttcccaatattgttagctaatagctttgacaacattggataattagtaccgcggcattcacgagtaatatcttgaactagtctatttggcgaatccttctttgccgtttcaccaaataattctgcagaaactttagagccagttcctacaacatttgagccatttaaaatagttgctccacctaaatagccatttttttcaagtacaactacttttttacccatcgaaagagcacgacttgccgccattaacccggccataccggagccaattacagccacatcaacatttagttgcctttcttcatgtacgacttctggcttttttccgtcaagagcaatgttattttcggctaatgcttttttaccagaatctagcattgcttgagtcatcaatgatgccccagaaacagcgtccacgtcaaaactttgattatcaataatatttttctttaatttaccaaaagtttgattaaaaattgcaggagtttccgaattcttggttactttgacatcactaattttattgttttctaagtcaatctcaaaatcaatttgaccattgcgaccatctgcttgagctttaatagtttgtttggtcataaaaactactcctttacttgttctttttactaaaccgcttatattataaccacaatattaaatctaaaaaataaatttaatttgatattttaatagaatttttttatcaaaagcagtaaataaaagcgagtgatcattctcactcgcttgattctttatctaattttcatccttatttattagcgtaatgttgaataacttctggcttcaataccccaacataaggaaggttacgatacatatttaaaaagtccaaaccataacccactacgaattcattgccaacctttgaaccataatattctaattcaacatcggtagttcttctggcttccttatttagcattgcacaacacttaacgctcttagcgccacgtgccataatgtgttctttcatgaatttcaaagttaaacccgtatcaacgatatcttcgacaattaaaacatcgcgatccttcacgtcagttaccaaatctgatactatcttgaccttaccagttgactcaaagccatcaccataactagaaacatcgagaaaatccagttgatgtgctacgtccatttgtcgagttaagtcagtcaagaagtaaattgcacccttcaaagccccaacaactaccggctttttaccagcatagtcctcagttaattgcttacctaaacggacgcacatctcatgaatgtcatcttctgtgaataatttgtgatctataatttggtcaatattgtcgccttttgccatttaatctacccttcaattcaatttacatatattattcctaataaaaagaattataacatctttaaacaaaaaaagcgtcattttcaacgcttcctctgaataatttctaattttcatcctttgattgatcgtctttttgatctttatccttaatcggttcaacgataaaccagcgcataaagccttgttcgatactgtctaaggtaaacttatatccttcaagttcaattgattcaccctttttcaagttaggataatgttccatcatgtaaccaccaatggtaataatatcgctatcttgaaaggccttcagatctgtatggaagaaacgctcaaagtcatataaagtcgtcttacctgaaacatgaacttgaccatccttgtccttgataatgtaatcatctgaaacatcatcaatttcatccttaacagaaccgaaaagctcttcataaatatccttatcagtaacgatcccactagtaccaccatattcgtcaactactaagacaattggtgtgtgcttagaaatcatcaagtgcaagatatcttgaattggcattgattcaggtaccgtgataatagttctaataattcttgttactggtacgttgccatcaatttggctttgttgcacaatgtcgtacgcataaacataacccacaacgtcatctttatcattatcacgcacaactggaaaacgactgtagccttcttccaagtattttttcaaggcataggcaattgtatcagttgaatcaagtactgacaatcttgttctgtcagtcatgatgtccttagcaaccttatcgtttaattcgaaagctctttccatataagttaagtcttctttatcaagcgaaccaccatgaaccgcattacgcgacaacttgatgatttcagattgtgaataaacttcattttcttcatcagctggagtaaagcccatcaattttaagattccattggagctagtatttaatagccaaacgaatggataaacaatcgtatggaaaatatgaagtggcgtaacgatccccatcatcatcggtactggcttgtcaatcgcaatattcttaggcacaacttcagttaagacaacttccaaataagttaataaaactacgcctaagattgcactaactgacttgatgagtgaatcattcattggcgtcaaatggaaaagatcttccaatatggttgcgaatgtatcagccgagaaccaacccaagactacaccaaccaaagtggtaccaacctgagtagttgacaaatactcattcaagttgtgcgtcatatgcaaagcacgacgcaactttttcttatttccttgacccttagcaagcatatcttcgagctgacttggtctagtttgaactaacgcaaattccgcagcaacaaagaatgatgcaacgataaatattaataatgttgcaactaaattagttactatttgagctggactcaaagtattatcacctttttttacaaatatattactaaaacctattttaccatttcttgcctaaaatagtgcagttttacacaagggataacggttttttgtaatttattcgaccaccttgtaaatttcattaaacggtacacgctttggaataaatttaggatcattaatttcagcattcttgtcgatatagccaactgcaattgccattccgacagcttcatcatctggaatttgggcatattctctaaccaattctgggtatgaaaccattgagtgagctggcatcacacctaagccacggttaatggctaaaagcatgatactttgtgcaaaaattcctaagtcaaaaacggaccaagctggagatttcttcggaaccgttaaaaagataattgctggtgcattgaacattgttttattcgcatcattaaataattgaagcttatttctgaaaaagaaactttgggatgcacccatcgtagccatattacgacttggataagtatcccaatctagtgatagcattgaagcaaaatcttcatgtgcaacttctttatcatcaatctttttagctgaagcagccttaaacttgcttaaagcatcccccatcaaaacatatgcacgccatggctgagaattaagcaatgaaggtgattgctgtgccattttaacgattccagcaattgttttttcttgtaattttctattagtaaacttccgcgttacatgttccttttcataaacatccttaaaattcatttttcctcaattcctttttgcttatataataacaatctatattttattatagtaaaaaactgttaaaaagcttaattattgctcttttcttgctttttcttttctgctgcctgtttttttaaataagcactcattgcaagatcattttttcgcatagcaataaacgcagtaatggttaaagttaatccgccaagacaaatcacaagtaagccaatcggaaacaagaagtctgctcccttaggaataaatgatgccttaattacccagcatgctataccaattaacatcaaaactatacccacaatgactgccttagtgttcggtcgatatcttttcataaatgcccttctttcttaattaacattctaacagaaaaagcttagcttcaacgtagaagctaagccgaaaactagagaaatagtcgttaaatttttacatgagagaggggaaagttgactatttaagttcgatagtttgtactttttgggaatgttcaacactgcctttttcaatcggagtaactgacttaatcaggtccatgttggtgtagacaacgatgcagctgtcatcgtatcccttgtctgtaatcatttggaaatccattgtggctaagggttgacctttcttaactttatcgccttgactaacattcactgtaaacggagcaccttttagttcaacagtatcaagacccaagtgaatcaaaaactcaataccttggtcattcgtgataccaatagcatgtttagttgggaagagtgtggaaatactaccatcaactggtgcatagatatgattatccttaggcttgatagcatagccatcacctaacatcttagttgagaagacatcgtcttttacatcagtaattggcataatgtcgccgtcaactaccgcatctacttcaatacccttattctttttcttaaagaaattaaacataattaataacctctggatttctaaaattcaagtaataatatcaacataaagcttgcgagtaataaaccagctgcagtaagtgaaattgcgattattactcgactaacgccatcttgtgtcttcttcaaagctcttgctcgataaaaacctaagatagctaatactacgcaaagcaagttgccaacaaagagctgagcaatcatctgacttcccatcaagaagcgataagtctgtcgattgattaaaaactgcttgtggtttaacaacatatagtagcctagtatgaagtcaacgatagcaacgattgtactaatcgcaatcatcggctgcttcataatcatcatccgaatcgattgaccagaagcaccgcttcgtagtgcaatcatcgcccaaaacaatagtggagcaatgaaaagtacgtatgaataccaagtcaaaatcttcttagtatccaagtgcatgctttcggttattcgatcgataaagttgccaacttttcgtttactaattgcccacattgatctctacatcctctccttgactctgttgccaagctacatattcactaattaccaaatcaattaagaagtacgctggggtaaaggcaaccttcccgctcttaaagtcggcatcatcagtaaaggcaatcgttggaaaataaatgttgtgctgcactaatgaagctaatttattttgcttcaggttagtgaacgaaacatatttgaatttatcattcactagttccaacttagtgatttcctcattgatcgttttattatcacccgtaaacgagataataaacaaaacatcgcctttttgagcaaagcgtcccgcagcttttaactcctctaatgctgatggcaaaacagttgcatgcttgccaactacaaacaattcatgagccaaatattgtgcgattaactcttgttgccaaccagtagagtaaatgtaaattgtccctgcattatctaaatcgcgatacaagctattgaaatcacgttgtttgaaatacttcaacacgtctgaatttactttactaagttcccgcgcaaaattattttcaattttgattggtttttgcttcgattcggctaattcgaccaaatcaaatttaagctcactgtagccacttagtcctagctttttacataaccggaaaattgcggattcggatacataaagctttttagctaatttggctaagcttaatttgctacagtctctcggattatttagaacatattgaactatctgtttttcagaatcattcaacttatgactattgtcatagaccattgatctcaaatttgccataatacctgtgcccttatcaatatataatttatatattaatgataacacaagcgctttcagattatagcaattgtttcatttgatcaacaacttgatcggcatccaatccgacaacgatgtcaacctcgttgttatctttatgttgtacttcgtaagaatctgcgatcttcttgaattctgaatctggagcgaccttcttaggatcaacgacatgagttcttactctagttgagcaagcaatgacatcttgaatgttggagtcaccaccaagcaagtcaacgataccagtagctctttcaatataaggattatcttgttcagttgataccttagcgtcgccaccttgttgttgcattaaagtgttcatttcatcaagaacttgaggtacgtccaaacctacgataacttggatagccttaccgtggtgtacgacattgacagccttgtttgctttaaatgcggcatctgaagcaactttatttggatcggcaacagatacacgtaatctagtagcacatgaactcaattctgtaatgtttgaaggaccacctaataattcaaggtaagcagttgctctttcaatgtaagggtcattagcgtccttaccagcagcttctgcagccttcttagccttgtattctttctttgaaagaaggtgaacatcttgatcatcggcttcacgacctggagtaatgtaattgaacttctcgatcatgatcttgaagacaaagtaagtaataataccgaagataataccaacgataaattccatcacataggtcttccagtggtttggccaaagtggaatccagttcattgaagcgataccgatcgcaccatctgacatgaatcctcttaaaccaaaggcccacataactgtgttcatcgtggctgacaatactgagtaaactacccaaagaactggagcagcaaacaaataagtaaagtcgataggttcagtaataccagctaatactgaggttaaagcagctgggataagcaaagctgaagtttgcttcttcttgttcttcttagcagttgcgtagaaggcaagacagataaatggtactaagaataccttttcgttaccgtaaagttggaatccttcaactgaagcgatttgtgaaagtggtttagtacttgcagcgtattcagcaaggtgtttcaaccagtatggttgcaaaccgccggcaacaacggctggaccgaattggaatggaatgtataccaagtggtgaagaccagtaggaatcaatacacggttcaagaattggtaaatccaaacaccgataaatccactatctacgatgaagtgttgcatgctggtgatacccatttgaacttttggccagccccagcaggtaatgagtgctaaaggaatcattacgaagaatgctaaagcgtagacataagttgaaccttggaaagtaccaagccagtctggcaacttcttatcaaagtacttattgtgtaaccacactacaataagagcaacaaccaaggcacctaagatactagtgtcaagagtcttgataccagcaatgttagttaaaccatggttagtagcgttagcaacaatttggatcttgtcaaagttaggaataccaaaagctgcaccccagtgggtaagcattgcaccgatgaagtagttgtaagtcaagtaagcaataactgcttccatggttgctctacctctagccttgttggctaaaccgattggcaaacctacagtaaacaaaataccttcttggttgaacactgtccaaccaccagctgaaattgtgtcccaaactgagttccatgtagttcccgggttggcaattaaaccaaacagagtcgggttattgaacaaactacctaaagctacgacaatacccgcaaacgagaacagcataactgggacgaacatagcggccccaaaccgctgtattttctgcatcataatcgtttacctctgaagaaaaaaattaaatcaataacttattcttacatctacacctgcatctacatctttatttcatcagatcaagtcaaccgcaaggtgctcatacaattgacttttgccatttgtgcttcacacaaatatttactcctcaaaaatgttttaagataaaacgtccagttgatatcaaattctgaacttaactctatcttagtagctagcttacatttttatttataccatagttttaagctaatgtaagcgttttttaaaactatgacttattgtttcataaagttaagatgatatttcatttcatgaaatttatttcagcccttcaatgatgtatataccaatatttatacccctttattttgcttgtcgcgcctatgtttaatcatttactttacatacaaaaataacatgtcaataaatatgctatagacattctctatttatacacataaaatcctctgaaatatatttcatttcatgaaacgaaacaagtgataaaacctttttcctttccaagatgaactactttgcttactgaaataacacaaagtctggcataattaacggtaagttaaatgcacaggaggaattattatgacaatcaaatttattgcacttgataccgacggtaccttgcttaattcaacaggtaagattttgcccagtacaaaaaaggcagttaaaacagctttagaccaaggaataaaagttgctttatgttctggtcggccaatcgcaggattaaaacattttatggacgaattaggaattattggacctaatcaatatgctatcactcttaatggcgcaattacccgcacagcagatggcaagataatgactaaagatctagtttctaatcgactttatcgtaaaatgtatgcttttgctaacgagcatcatttaccttttaacgttgtttcccctgattcaaaaataattacaggagatcatgatgttgatttaatggtttatactcaagcttacgaaaatagtgcgactttatacattagagagctagatgaattgcctagtgattttgaaattgctaaaggttgttttgccactaaagctaagttgttagaccaatgggaggataaaattcgccaagaatttgggcaagagctgtatattgttcgtgccgacgattgcttcttagagctacttcaccctaatgttaataaaggaaccggattaaaagaattaactgaaaaacttggcattactccagaagaggtcatggcaattggagacgaaagaaatgatattaccatgtttgactttgctggaacagctgtttgcatgggtaatggctccgaagaagcgaaaaagcatgctgattatgttaccacttcaaatgacgaagatggcatcagcaatgcttttgagaaatttttatgaacaacctaaaacaagtatctgagaagtgattaatctttcctagatacttgttttattatttgttcaaatattcacgcaaagctggcaaaactttctccgcctcaactcgtccgacctcatacactcgtcgcatctcttttttatctgtttctaaagtgccaatttcaagcggaaacggtggacgaataataaaagcttggtcagcagcttcatcttttaccatctgatcaagcaccgcattataatcctcagctttagtagccaatttttttactactgcggggtatttccttaaaattactttttccagtggatagagcttactctgctttttgcgataagacttcggctgtgtagcaatgactacctttttatcacagttttgctgctctaaaaaatcatacggaattgaatcagatacaccgccatcaaagtaataatgcccatgaattgcaactggatgagcaaaaaatggaatcgacgacgaggctctaatccactctaagtcaacataacctgcatcatgtaattgatgataaaccggctcacctgttgcagcatcagttgcaacacaccaaaagtccattggattagtcataaatttttctttatcaaaaacatccaacttatcaggcaaaatatggtaacaaaagttagccgcatacaaattgcctgaccgccgccatgatttccaactagcataatatggtttccccgcaaagcgcatgttgtagcgcaatactcttcccttttgctccgacttcaagtttacgccaaaggcagcaccggctgaaacgccaattgctaaatcaaaggttatgtcattttctaaaaacacatcaattacgccagctgtaaacagcccacgcattgctccaccttcaagtactaacccacttttcatattttccctctttatcaaaaaagacctacgcttttcgcataggtctaatttattcttattttaattttacttcaagcccgaccattgccattcggttacttctggcatgtctttaccattgtcgcggatgtattggtggtgcttttcaagcaagtaatccatgtgactgatgaagtccgcattcttgcccttcaaagctgggatgctttctacggcatccttagctaggtcaaagcgatcaagatgattcaatacccgcatgtcaaatggggtagtaatatcaccattttcttcatagcagtgaatatgaacattgtaacgcttgcgagcaaaccaaatggattccatcatgctcttgtagccatgccatgcaaagattactggtacatccttagggaataatctgtcaaattcttcagttgacaagccattcttgttgtcctttggatccattaacttcataacatcaactacgttaatgtagcgaatcttgagatctgggaacttcttatgcaaaatatcaattgcggccaaagtttcaatagttggctcagtttcagttgaagcaaagacaacatccggcttagcacccttatcagttgaagcccagtcaatgtagcttaagcccttgtcaaccaacttttgtgcttcttcaattgagaaccattgtggacgaggctgcttagaagttaccaaaacattgatgcattctctatctttcaaggccttatcgccaactgccaaaagcgtattagtgtctgatggcaagtattcatgaacaagatctggacggttcttttcatacaagtgagtcaagatgcctggatcttggtgagtgtaaccattgtggtcttgttggaatacagttgaagttgcgacaaagttaagtgatggataatcatgacgccagtattgttccttagcctttctgagccacttcatatgttgagtaagcatagagtcaactacccggccaaaggcttcataagtagcgaagaagccatgacggccagtcaaaacgtagccttcgagaaagccttcatcttggtgctctgacaattgtgaatcaattactcgaccgctaggagccaggttttcatcatttggttcatgaatctctggttcccattgccgcttttgatcgtcaagcaattggaacagacggtttgacttggattcatctgggccaaagccgcggaaagtagttgggttgagcttagcaacttcatccaagtacttagcccattcaaccatgtcttgtgcctccatagaacctggcttgtcaaacttcaaagcaaatttgcggtagtctggcaagttaagccgcttaggatcaagaccaccgttagtgattgggttcatggccattctatgttcacccttagcagtgttttcagttacgatttccttaggtgaaccgtcttcattaaacaattcttccggcttgtagctttccagccaatcagtaagcatatcagcgtgttccatatcgccttgagcaactggaattggaatttggtgagcacggaagctgttctcaattgggttgccatccaagtccttctttggaccagtccagcccttagggcattggaagataatcattggccagtgtggcaaagtagcgtcattgttttcacgggcgtgcttttgaatagccttgatttcttcaatgacttcatccatggtcttagccatttcttcgtgaacctgcattgggtccttttcaccgtcaaaacgaccacccttaaagactgaaacaaagtgaggatcccagcccatgccacggaagtattcggttaattcttgatcgctcatgcgagaaacaatggttgggttagaaatcttaaagccgttgatttgcaagattggcagaactgcaccatctttaattgggttaatgaacttgtcactaaaccatgaagcagctaagggaccagtttcagcttcaccatcaccaatttcaacagcggcaataacatctggattatccaaaacagcaccagtaccgtgtgacagtgagtagcctaattccccaccttcatgaattgaacctggagtttcaggagcagcgtgagaagcaacaccgcctgggaaactgaagcgtttgaatagcttagccatccccttttggtcctgggtaatctctgggtaacgttcagtatatgaaccatcaagatatgagttagaaaccattacctgaccaccgtgacctgaaccctcaatatagaacatgttcaagtcatacttcttaagcacacgattcaagtgagcataaataaagttctgtggtgcaatagtgccccagtgaccaattggcttaggcttaacgtcttctgcaaccaatggggtcttaagaagagggttcttcatcaagaacaactgaccaactgacaagtagttggctgcgcgccaataagcatcaacgctctttaaatagtcttttgagtcataatcaactgccatcttattctcctttgagcatctaagagtgctctttttcatttgttcttttgtttacacttatatcataccaaattatctaaaaagttcaactatttttataattggatcctaccaattaaaaaataagtatttaatttaaaattgcatcccttttttgttgctatatcaaccttttaatgctttgatataagtatttagttgcttaaatactgataagtacagataaacaaatatcaaatactgacataatcagtgcaaaattattcattcatgttagattactaaatggagggcatgagatgacccaagaagaaagattaatacaaattaaacagttacttaaaaaaaagcaccaattatcaactagacagattgcagctcacttcaatgtatcatttgatacggcaagacgagatgtaattcatctaactgaaactggtcaagcaattagagttcatggtggtttgatggaaattaattgcaacagcgtacctgattttttagcaagaaatcaagtacaatcaccggttaagatgaaaatggctagaatggcaaagagatttgttcatccaggtcaatgtgatttcatcggttcatcaactacgttaaagcagctctgtccaatgcttaatggtattgacatgcagatcgtcacgaattcaatcgacaacgcattaagcttattagcaatagaaatcccatcagtcagattgttgggcggcgttatcaacaaaaagcagcgtttcatttattctgaaacagcattagaaacattgcgtcaaatccatttcaatactgcatttattggtggatctcgaatcagagatgacggcgtatatacaccaagcatggctgattccaaaattgtcgaaaccgccgctagtcgcgctaatcaagttgtattagttgccgaaaaatataaatttactaatcaatcctcttcgccatacatgtctgtccccctcaatcagatcgatgtccttattaccgacaccccattgcctgaggaattaaagcatcattttaatccaaaaacgcaaattatacctgttttaaaggagtgatagttatgttcagtctctttaaccaaaagaaacaaagcgaaagtcgtgaagtataccaagatttgaagaatttttataatagtttttttagcaatatctacaatgaaatgaatattggtcgctatcggcagattcgcgatgcaattgggcttgttcttaataagttcgacagtggtgatcatcctcttgaatacactagcaaattggtcatgtatattcaggctcgaattgccatgaatcacctgcatctaactcatgaacagcaagacctaatgaaaaagctaagtgacgctaccaaatatgtaaatctttcttatgtttatctgagtccgctcacttcggtagaacaatttgttaatatttaagtgtatctagaacctgctctagatgaaaaaatgaatccaaaaagaccgagtagctgatctgctcggcctttttatgcaataatattgttaaaagatatagattttttcaaaggaaataattatgacaaaattaccattcaaagttgttgctgtcgatatggatggcactttcatgcatgatgatcaaactttcgatcacaagcgctttgaccgcatcttaacagaattacacaaaaaggggattcactttatcgtttcaagtgggcgcccttataccagattacgcaaagattttgctggctttttaaaccgaatcgacatgattgctgacaatggctcgcttttgcttcaagataatcaaattattagcactcatttgctcacttataaaacaaccttagatctaataagttttatcaaagagcattattccaagagttcaattattgtcactgggatcaacaattcatatacaactattaatgcttctcctagttttaagcagacgatgaacttctattaccccgatcgaattgaagttactgatttagcagcggctatcaatccgcaggatatgattactaaaatcaccttaagttatcaatatgatttttccgcggaattagaaaaagaattcaaccaaacccatgccgagaagattcactgtacttctagtggtttcggtttgcttgatattgtgccttacagcgttaataaagggagcgctctaaaatactcaatgtcattaagttaagacattgacaaattgaatctaatctctgtagaaccgaatcattatgatttggttctttttttgcataaaataaaggcgaaaagaacctaccttttcgccctctgattaaattattaaaccttcaaaattattgccagaaagctggtgttaattatgaaagcccttcacagaaatattttagatcgtcttgatcaaattatcaatgatactggaaagcatattcatgattttatcgatgatcctcatgccttcactaggaagcggtttttagatgcagctacagtcattaaaactactattaatatgcaaggaaaagatttgaccagtgagttgtttagagcttttggccaaaaagctattaaaaataacgataaagtagtcagtacttccgcttatgtccaacgcaaaggtcagctttcacccgcatgttttaagcatattctaactgtatttaatcagaatttatttaatatccagttatttgatcataaatatcgtatatttgccattgatgggtctgattttaatcaaatctggaatcctaaatcagagaatatcgttggaaatctcaatcataaaggaaagccatattgccaaattcatgttaatgcactctatgacctgttaaataatacttatcaagactgcatctttcagcctaagtcaaagatggatgaacgtaaagccgccgttcaaatgcttaaaaagctaaattgcggaccatatatagttactatggatcgaggttataccggctttaacatgattgaaaattgtaatcgcctgcctaactgttattatgtcatacgtactaaaacgggatatggcgcatttaaggaagtagctgagttgcctaatcaagagtgtgataaggatatagcttgctgggtgactacctctaattattattatgaaacccataaggctacagaaaacgttcatttggttaaccatcattaccgtcaatatataaaatatcggtctaaaaataccaaagatggcagctgggactttggagagttatgtacaataaaatttcgtgcctgtaaatttagaattaatgatcctaaatcaggcaaagaagaatgggaagttgttctaactaatctaaatagagccgattatcccttaaaaaggatcaaagaaatctaccatttgcgctggggcattgaaacttcattcaaaaagttgaaatatgctttaggtagcgtacagtttcattccaagcaggatagatttattgaaatggagatctatgcccacatgattatgtttaacgcagtcagtcaaattgatgctcaagcatatgtaccacaaaaaaaatgcaagtatcaatatgcgatcaatttcaaacagtcatgttttgtcatccaggctatgtatataatttcttcttcaactgaaatctttaaaaagattcttattcaaattagtcattacacaattccgatcagaccaggacgaaaagacaaaagaaatctcaaacccaaatcagctgtatattatttatatcgtgtagcctaatttctaaacaagatttgggtttatttggcatgaaaaaagagcattcaaatgcgataaatcgcaaatgaatgatcttaaaagtccaagtcgataatttgtcaatgtcttaacttaatgacattgctaaaatacttcttacgctattttggtgctaaacccaatgaattaattgcctttggcgacggaatgaatgatgctgagatgttaaaactagccggttacagttatgcgatggctaatgcagaagatcaagttaagaaaatcgccaagtatgaggccccgagtaacaatgatgatggggttttagaggtgcttgattcatatttagctaaagtagagaaataataattactgtaaactaaaaccgtctgaatgagcaaaataaaaaagtagccaagttttcttaaactaattgacttaagaaaacacagctactttttatttacccaaattaacaaaggtattaaagttcatataatgataatgcacgcgcatatttgatacttcaaacggcgtcccatcatccaagaagaagatcccttccattacaccaacaggttcagtcggcttcaaatttagcttctgctgatcttcttcattcgatggttcaacagtgatattcaagaatgacttagtaacggtctttccctgttcatcttccaaatagttaaacaaagacttttgtaaagtctctggctttaattccggcacaattttaatcggcaaatatccagtctcaattaaaaatggttgttcatctaacagtcgcagacgcttgaattcataaacaaaatcattttcatttaaaaataagtcttccgcaatttctttagttgccttaatcacatgaaaatcaagcaacttaatttgttgttttttaccagggactttaaaagaatcagtgattccaagattcgatccatcataacgaaacattgcctgtttgcgcaaatatagtggattaataaaagttccactacctcgctttttaaaaacgatcccttgttgagccaacagctccagcgcacgcttcattgatgatcgacttacctgatagtgttcggctagactgcgttcatcaggcagtcgcatccccttatactgattattcaaaatattctgtttaatgtcatgcataactgtccgataaacataatctgccattattctcgtccttgatctgcctttttaatactatcaataaaccaagttgcaaacttatccaagtccacatctgtcgcaatctccgcattggcatgttcttggtccataaaatccattacgctggcaccataagtatattgcccgcgcaattcaatattcacatttgcctttttcattgtaaacatttccggatgaagcataattccaactgcagtcggatcataaatcttaattcgcggatcaccgtctggttcatgaatgttagagaaaagtgaatacaacatattacccacttcaccacatgtcttaactttatccatttgctctggtgttaaatgggccttatttccaatttcaagtggagcaaccttaactagcaatccactatgaaaaactacctgcgctgcttccggatctcccgcaatattatattccgcaaatgggctatgatttccgtgaccaatattaccacccataattacaatttccgcaatattttctttaacttcaggatattgcttaaaaagtaaggcaaagtcagttaatggtccaatgcccatcagagttattttttctggactacttttaatttccttagccatcaacgttgcagcaagaccaggttcaattaaagaatcatcagcttgttcaaattcaaagccggcaatccctgttttaccatgaaccgaagcagcactaatcattggtgccaccagtggttgattagcacccactacgacaggaaccttagtatgcaaaaacttttctaaatttaaggtattttgcaaggtatatttcagtgccacgttaccccaagtaggcacaatcatgcgcacatcaagttcttgtgcaaaaagactaatcgtcatggcagcaatgtcatcaatgccaggatcagtactgataattaaaggtttcttgttcataaaattatcctctcgtattaagtacttttataatagcaaaaaaccaaccaattaagaaagtggttggttttattctaataattatttttcttttttgggtttaatacgttgaatgtgttcttcttcatggtcacctaatactaatggcacacgctcaaccacagtatcggcatactccagtccgaaccaagatgcagggttagaagataaattctgcagccatactcttgcttcaaccatgaacttttcatagcctgtcaatttagttaatggactaattacgtcgttaacaattacaaaggcgaagtcccctacatcacgacccggtgtagtagtgaattgttgtggttgagcttcaatcgttccatcagcgatcaaatcatgaacaatttgccgcaaataaacatttacactggtttgttttctaaaacctaaatacaactgaacgttaattacattcttagtaccataagtattgaccgcgtattctgcagtatatggctcgttagtaacattaacagttacaaaccagtaagccttagcccgtttaggtctcttatccaaaattgaataaagcatttcgcgcttaatgaatttattatacttaaccttagccatataaactacattcgtagcgtaaactggataatcatcacagtggctcaactcagtcaacatatctgtatattcatctaagcgaacataagcattctgctcctcacgcttatcacggatcttattgccatagaaccacacgtacatgattgccaaaataaaaccagcaattaaaacagtgacgtaaccgccatgcaaaaacttagttaagcttgagaataagaacatcccttcaataaaggcaaagactactaagaaaatgcatcgtattgatagcgcggtaccttttttacccagatattcaaataataagatagttgtcatcaacatggtaaccgtgatggccagaccatatgctgcttccatatgatgtgaagttctaaataagaaaacaattgcaactgtaatgacacagatcatcttattaattgaaggaatataaatctgtcccttctcatttgaaggatagataatattcattcttggtaaaaattttaaactacttgcttcagctactaaagtgaatgaacccgtaatcaaagcctgagaagcaataatagcggcaatcgtagccaaagcaatagcaaacaatcttagactacttggtactgcttcaaaaaatggattgaaatcaccattaccagcatgataattagcattttgtaaaatccagacgccttgccctaaatagtttaaaatcaagcaaacaaacacataaggccaagagcccataatattacttttcccgacatgtccgacatctgaataaagagcctcagcaccagtagttgccaagaaaattgaacctaaaatcaaaatacccactttattagcaggactaaataaaatacgcaaagcatgaattggattaattgcatcaagcaaactccaatcatggcttaagttcataaatccaatgagccctaaaaaagtaaaccacaggagcatgattggaccaaaggccttaccaatcacactcgttcccattctttgaattgaaaatagtaaaaccaggataacaatagtaatcaagataaccatatcttgcgacgaaactggaattacatcaccaaagcgcatatttttcaatccttcaattgaagttgtaacagtcacagctggagttaatgtcccatcagctaacaatgctgctccaccaattaaagctgggataactagccatttagccctctttctaaccaatgcataaagagagaagatccctccttcaccatgattagtcgccttcaaggcaattatcacatatttgaccgttgtcaataatgtaacagtccaaaaaatcaacgaaatggagccaacaattagttcacggttaacattactaatcccaccattttcagtcacaatcgacttcataacatacaaaggactagtaccaatatcaccatagacaataccgatagcaattaaaaggccagtaaaagacaccttttgcttaccagatattttattcataagtttttatcctctatttcacttaaaaattgaaatttttactagtatagaaaaagtctagattttttgcaataaaaatatatctttttgaaaaataaaaaagaagatgaaatctccttcagtcacttaatttactttttcttatcttcgatggtgccatcactatgagcaataattacttcgtcacacatatccaggaacaagccatgttcaactacgccaacagtatgatcaaggtaatcagctaaaccatgaggtgctggaacaggatctgcagccaaatcaataatataatttccatagtgagtcacataacgttgattgccatccatacgccaccgaggctttaatccttcttgttcaaaacgtttaaagttttgttcacaagaaattggtaaaacttcaactggtaatgggaagccgcttaaacgatgcactaattttgattcatcaacgatccaaatgatcttcttagaattgattgctacatttttttctaaagttaatgcaccaccgccgcctttgattccatccaagttatcggtaacccgatcagcaccatctacagttaaatcagcttgatcaatatcggccaattcactaactttaaagcctaagccctcaagttgttttttactacggttactagtagttacgatagccttcagttttaagccgtcttcatctttgcgcttacctaaagcatcaatgaaaaaggcaacggttgaacctgtaccaacgcccaataccatacctgatttaaccatggcagctgctttttctgctgcttcttttttcaaacgatcttgttcttgcttgttcattattcatcatcctccatcgcctgtttaacttcctgttcagttggaattgaaggctgagcacctaaacgttgtacggcaattgaagatgcacgacttgcaattttagctgcttcttcaaagttagataggccagaatttaaattgcttaccaaatatccaataaaggtatctcctgcaccagtagtatcggctgcttcaactttataagtcggtattaattcttcaacatcgggagttgaaatatacgcacccttatcaccataggtaataaccacgttttttacaccaagcatgtgtagtttttctgcattagtggccagcgttgaattatctttaattgcaatgccagtgatcttggcactttcagtttcattcggtgtaatgatatcagtatattgcagtaattctttaggaatctcatcaactgcaggagctggatttaaaatagtgatttttttggcctttttagcaatcttaaatgcttcaagcgtcacatctagtgggatttcgaattgagcaattacacaatcccaactcttaatcaaatcaccagctgcacggatatcttccactgtcagttcataatttgcgccgtgatcaataatgatgtcattttgcccagcttcattcaacgtgatataagcatggcctgtctttgctcccattgtggtttgcacataagttgtgtccacgccataactcttgagctgatgcgtgataaaatttccttcactatcttcacctacacggttaataaagtaagtttcagctccacttttagcagctgcaattgcctgattagcacccttaccgccaccagcagtagtaatgtctagcgcattaattgtttcaccaggcttaggaaagtcttttacatgtaatgttgtatcaacattacttgaaccaataactacaatcttcttcattatgagcatcctcttctaaaaatggatttattcaacctcaattataacaaaaaacgtattcaaaatattgaacacacatttttgaaatcttactgtaaaataccaccattaacgaagccttttaagcgctcagcttcccacttcaatgtatctgaatcgtcaacttgcgagatcttatacccaacgaaatatggtgaagcatagaatcgtggaataatcttgcaacaagtaccttgaccatcattaattggatagaaaaataagttataagaatcaacaccatgtgacaagactgaacgcacatattgtgtgcccttttgaatcaaatcggcccaagtatccaaattagtattatcatgtgtcaaaatatttacttcttggtagccttgaactggacgcgctgataagttcatttcaactgaacccgaacgcccgacttcaaatcctttaaagttatcagcgccaatatcgtgatagccatctttatgatataagcccacgatctgcatatgtggatgagttaaagaaccatcagacttgggaccaaaatttttataccaaagcacactctgataacggcctgaattattcattttttgaaaacacttcaagccaaacttcatcaactcttgattatcttcacgcgtataagttgaaatatctccctggtgatcacttgattcaattaaaattgtttgattagtatcctttaacgtagggtacttattcttcaaccaaatcttatcgccatctttttcataaatattaattagatgctgcacatcacaaaaaggacagccagcattctgatttccttgccgattaccataatcataatcatatggcttacgcttaccaattgaatattcatacactaaaggattcttgtccatatttttcacctgctaaaccaaagatatcatacatttaacatcattttaacaattttatcggttaattgtgaacatttttattaataaagctaggaatagtacgtctatctatgataaactacctttgtaaaagaaatacatgatatacatgagaggaagaatcatgaaattctataaaaaattggtacttactggtgccgcagctttagctgttctaggcttgagtgcatgttcaaataataattctagttcatcttcatctaataagaagattccaactaagattaacaagaagactaccgttaccttttggtattcactaactggtaatgcgcaaagcagtttgcaaaaattgactaaagattttgaaaagaaaaatcctaacattactatcaagttgcaaagccaaggcggcaactactctgatttacaatctaagttggtttcaggtttgcaatcgccaaaggatttaccgacaattactcaagcttatcctggctggctttacaatgctgccaagaacaatatgcttgttaacctaaccccatacattaacaattctgaaattggctggggctcatatgctaagagtggcattaagaaagctctttgggatggtgcaaacatcaacggtacacaatatggtgttcctttcaacaagtcagttgaagtacttttctacaataagaccttacttgataagtatgatgttaaagtcccaactaacatgagtgaattggcttctgcatccgcaaaaatttaccgtgaaagtcaccacaaagtacgcggtgttggatttgatgctttaaacaattactacatgatgcaaatgaaggaaacttacggcaaagacttcaataagaacttaaactttgctgccaaggattccgttaaagccatcaactactacgctaatggagtaagagccggctacttcatgcaagctggtactgaaaagtacatgtcaactccattcaacaatggtcgcgttgctatgttcatcggttcaactgccaatgaagcttaccttaagcaaggacttaagaagggttacacttatggtgtagctgctcgtccaagcacgatgaacgtacaacaaggtactgacatttatatgttcaaaaaagcaaccgcaatgcaaaagtcagctgcgtttaagtaccttaagttcttaacttctaagtcatcacaactttactgggctaaacaaacaggctacatgccagttaatactgctgctatcaacgacaaggtttaccaatctgccaagaacagcaagataccagcaattattgccaagacctctaagaacctttacttcttaccagtaactaagaatgctactgccgcatatgatcaagttaatgctaacatgcaaaccattttagctaaggcaagtaaaaagcaatcatggaatagcgatatcaagactggtaaagataagcttgatgctgcttggaagcaataatttttcaaataaaatatctatcaaaaaaagaagttcagtattaattgaacttctttttttacctaattatttactaaaaatggatattgaatttgatcattatcagttacattcaacttgtaacgagcacgatataaagccttttctaccgctaattgccctgcagttgtggccattgcaatcgaatatgacttgtgtggtgaattgatcaggatttgactgatagaatgcttaatgtatgactggattagaatgacataattcgattccttacatgcacgtaaaacattagaagcctgtttcatctcgataattcgagctactccattgtgtgcttcaatcaccttagccaagttagaggttaagctcttgtctcctactacaacggtaactcgttttttatcgaggtcaaaatcaattcgggaagcatagtcttcattttgcttttcagacgactgcttctcctttttttctaattgatgcaataaagacttgtgtctacctttagtcttgtgcttttccgtttctttatttttatccggcttttccttcttttctggaatagtaacttcagcttcggcataacgccatctaaccctaatgaaggatggatcactgactcgccaaacaatactaatcaggtcattttcgtgtaagttaaagtgacttacagtattcatgtctaagtataaaatagctttttcaggatttacttgacttaggtttttgccattagagtcctgcttgatgtataaaccaaaagaatcacggtgaactaccgctggaccaaattcgataatttcctcatctggcgcaaaagactttgcatgatgctcaactttaataattggacgattgccactgtcatttaagtgatctagcaaagtaactgtatcaccgttttccagcttttcaattctagtcaagtgttcattaaaatattgtactgaatgaccattctcatccactgcttctgcacctagcagcttacgcctaatctcatattgtttttcctttggtttagccacaggaattattttcttaaccacaggcttaggaataggagttatggtcgcatatttgtttttattctttaaaaccgtaggactcagagctttagcagcttcttcttttttagctttttctttttcaagctcttccttcgtttttttcggctttattttttctacagtattttcatcattttcttttttagtttctatttcagttttattttctagcttattctcagtttttatttctggctcattttttacagcctgatcagctttttccgcaattttaacgacttcattcttattctcaggtggattgcctagtactgcctggttatatattttactaataattttcaacgcaatcattgactgcttcagtgattggggatcgctccccgtcgcctgcattaaatcaataatatcttttctataatcaatcgtcatatatttaccttcttatttcttaaatatgaatattatacaaaaatttttaatgctaatctaattctttatagatttttatattatttttcctgtaaaaccattataataaaagtagttaaaatatcatttattaaatgagggagactactatgaaaaagaaacttttacttttcgtatcctttttagccggtttattgttcttggtatctacaccaacttatgctagcaagcttcctaaaggctatggtattgctaaaacctttaccacaccaaaagcaacccgtggcacctggtattatcgcgaaaagggtgataaaacaatttctaaggtaaagattactgctcatagcgtagatggtaaaaagctttacgtaccttcacaaaagttcttcgagaaaaatgtttacaacgtttcagctaagaagcgtaatcagttcatcaaaaaaactgaaaatatttatgctgcagctaactataaaaagggcttcaatgtcaacaattgggttaacttagctggtgatggtgaatactacatccctgttactagaactgttaacggcaaaaaggttaaggcattaagaatagctactggtgctggtccttatactgctgcatatgcatacaaaactaaggcattggttaaataatcattgtctaacgaaaaagcaaattagcataatttgctttttttctacccaaagtcaagtattatcaatgatttaagaaaataaatttacttgttttaatgatgcgaataaggttaaagcaaataagagtttaaatttaagaaaaagcgaaagtaccacaaataagcctatgaatacttgtagtttttccataggttgcttatacttaagttgattatttgatttcagctaaagtcttttattttcggtggctatgttgtaatcatataattgatcatgtttgataagagcaaacattgtgcgtatcagtttatggactgatgcaatggcgattttcttatagccttgtctatttgaagatcgttttttcttgtcataataatcagttatatggcaaggctgcgtagcctttaccgtctccatttgagtaataactcgataaagtatttttctggcaatatgattgccatgcttggtaatgccaagagaactgtctttttcaccagattggtaccttcctggatcaatgccaacaaacgcatcaatttgagctgaagtgctaaaccgtcttagatcaccgagctctgctactaatctcactgctgtaattctagcaacccctgggatactcaaatagatggataaagcacgagcgtttactgctttagccagcttttccatgtagttaattacatagtcgcgttcttgctggagtgaaaataaattagaaatgttcctttgaatagctctaacgataatactatctttggaatcataaggataagcttctctagcaaaagcgtataatcttgtggttaagtaccgtgccctttgttgtcctattccagaaatagaattaagcatttgagttacctgtgtctcattcttttctagaacatatccagcatgtgggaaaagactaacaagcgcccaataaattctgccagatggatgagacagtatttcttcaatttgtgggaaagtggattggaggttgcggtgcaattgatttttagtagtaactatactcctagtaagttcttcataatagcgactggcattctgaagttcatgatactctctgggctgtggatcacgcagcttttgcggggcattaaattgaattaaagccaggcgataagcatctaccttatcagttttattatggcgtaaattattgtccattagctttttcgctttaagcggattaagcttcaaatacttaatatgataatcctctaagaaagcttgcaggcttagagaataaacaccagtagcttcgaaaacaactaaaggagttatcaaatattggttcagttgctcataaagtttttgatagccaaaggaatcattagagattctaaaagattcgccttgtttgatccggtcattaaccacacaaactgtggaagatttactgctaacatcaataccgaaaataatttgtgattccataatataacctccgctgtgaagataaacctctttatcaacctattaattctaattttctaaacacggcatctaagtgcccacagacttcgaagagacttaagaataggtggtaaagcagtccgtttcttttacgacatcaagtgtctaaaaagctgaagacttgatttgctttatcttcactttctattttagacaaaataaaaagtgccagatcgtgaatccgtcgattcatgatccaacactaggttagtatgtttcttttaccgatttttacttttccgtatttctccttcaaaaagagcggtcaattttgccaaactcttatgatcaggatagcgttgaactaattgctcaattttatcggtagctaatttttttacttcttcggctgagcccattttctctaaaaaatctgccaaatcacctgaacgagcaagtaacttacgctcactacgactttctgccagaaaagcttgatcaaccttacgtaacttcaaactaccatctgcattaaagtgatatcctccccacatatgctgcttaattggttgcatcggttcgctatccacataacacaattttcctaccatatggtgcgtctcagtaattcctaacgtaaccgggtcataaatatcgacatagttaaaaattttctcccgcattttagccacctgacgtcgttctgttggcgttaataaaagccaaatattggttccttcatacagataagcagctgcaattgcttctggatgacgacaattagctaaagcaaactgagcattaattgaacctaacgaatgaccataaatataaattctactacctttaaattgattaattgtctgattcaataagtgagcagctgactttaattggctaggaatcgtccgttttcgtgcaagcagtgcttttaaaattggtagattagttttaatccattcatcacgccaagtttgtggagtcccctttttaaaaccatatgatcctttaaataagattgttatttcattcggacttgaaatgacgaaggctcgcatcccatccttagcataaacattacgacaaacagttccaagataatgttgatctattttgatagtatcacccagctgcaattcatcatatgtctttttagttaattcaactcgttcacgatctgttaactgtgcatttacactcataatttttcctaaaataaaaaactaactcttactattatgttagcatgagttagtttttttggataatttgagcctttaatcatattttttctgcaagtaatttgcaatcgttgacaagcagaaacagacaataaagtacatgattgcaataatcacatacattggaattaagtaagtcgtgttctgactgtaaataatttgtgcgtggtataaaagctctggcaaaacaatgatagttgccaatgaagtatccttaaccaatgatacaaattgtgataataatgccggaatcatattgtgcaaagcttgtggcataattacatgatacatagcctgaccatacgacatcccgttggaacgggcaccttccatttgacccgaatcaactgagccaattcctgaacgaacaatttctgctagcattgcaccttcaaagatgactaacgctgcaattgaagctgtcgttggattcgttacaatacctaattgaggtaaaccaaaataggtaaagaagatgatcaacaatagcggcaagtttcgaataatatcaataataaagcctacaattgcagacacatacttaattttcatgtagcgaactaatcctaagattaatcctactacgaagcttaatgcaattgaaattaatgaaacataaatcgttacccaaagtccttgtaataagaagcgaatatcgacccatgaatatgcatgaataaaagtttccattctctatccccttcctattagctgactaattttttctctaaatgacgcatgtagtaactaagcggcaaagtcaagatcaagtagaacaatccaacaataatataagtatcaattgtttggaacgttgagaacgcaatcaattgtgcttgatacatcaagtcaaaaccggcaacaaaggccaaaactgaagagtttttaaccaagttgacaaactggttgcctagtggtggaatcactatcttcatcgcttgaggtaagatgacataacgcatggcttgcacataggtcataccgttggagcgagcaccttccatttgaccagttccaattgaattaattcccgcacgaacagtctctgcaataaacgctgatgtataaagcgttaaaccaattgtccccgcttgaaatcctgacaatttcacaatataacgtggaacgatcaaataaaagatcatgacaattaccagcaaaggtatatttctaaaaatcgcaatatagatcttcgcgatcacttggccaaatttagatggtgctacctcaagcaaggcaaaaatcacgcctaaaatcaaactgaaaactagagcaataatactacttaaaatagtattccaaaaacctgttaggaagctgccccagttgttagtaataatttgccacattatttcaaaaccccctttagactaaaaccaggaattccagcaaaccactttttaatcaaacggtcataagtaccattcttttgtaattcattcaaagcttggtcgatatgatcagccatttgtttttgtcccttattaacagcaattccgtaaggagcattactatagacgccgccgactaacttataaccaggattttcttgagcgataccggcaagcaagccgttgtcagtagttaatgccacaccttggttagccttcaatgcagacattgcttgaccatagtcatcatattgcaaaatccgcgctttaggggcatacttatgtacatcatcaactgcggtagttcctttaacggccaaaacagttttgccttccagatccttaacattcttgatcttactattattaggcactaacaaagatgaaccggctggaaagtatggcttagagaaggttacttgcttggcacgttctggtgtaatagtcattgtggctaaaacagcatcaacatttccattttttaaaagtgggattctagtgttggcagtagtagtaacaaaatcggttttagcatctttacctagcatttgcttagttaaagccttagccaaatcgatttcaaacccttcaatatgtcctgtcttaatgttcgttaagccaaacaatctagtatctgctctaacgccccaaacaattgtcttactttcttttactttttgataaacattattgctagcatgcttgccacaagcagtcaaggcaagtgccaagattagcaataagggaaagaaaaaaaatctttttaattttttcatggcgtgccaccttaatctttagaaatgatcttgcttaagaattgacgtgcacgttcagtatctggatgagcaaagaattcttctggcttgcgatcttctaaaatatgacctttatcaaagaaaattaagcgattgcttacttctctagcaaaacccatttcgtgggtaaccacaaccatagtaatgccttgttcagcaacatatctcataacttctaaaacatcttcaatcatttctgggtcaagggcactagttggttcatcaaataaaatcaccttagggtgcattgctaatgatctagcaatcgctactctttgtttttgtccaccagataattgatgaggataagagtcaattttatcggccatacctactttttcaagatattgcatcgctactttacggttctcatcatcaggacgctttagcacaatcttaggcgccagcataacgttctctaacacagtgtgattattgtagagattaaagtgttggaataccatcccaacatttttacgaatcttattaatatcggtctttttatcagccaaatcatacccagttacaattaattgaccgctattaattggttccaagccattcatagttctaattaaagtactcttacctgaaccagatggaccaataattgaaaccacttggccttcatcaatctttaagttaatatctttcaatgcatggagctttccatagtacttatcaacatgcttaaattcaataattgctgtcatggcttctacctttctttcctttgtctacacaatataattattttactcttcttaaagctaaaactaaatattttagcaattcaaaatagtataatagcctgctaatcttataaatttgttcggttttagcaaaatatatttgtatttagctagattaaaataatcatattaacgctacttacgaatttattaactactaactttcaggataaagaaaaagcccatcatcccctctagtttgggacgaaaggcttttttccgcggtaccacccacattgtctaagtatagaccaactcatgaagcaccgacatgcttcaccggcgtggtaacgtaccggagacgtctcgacctactataagaattgttagttcggtgagctgctaaaagtgtttttcaatagttcagggtctgctggcttttcactaacaccaactcactgctaagaataaactacctactcgtctttttcatagccttttaatttatttatatgtatttaacattatttttcaagaaaatgcaagggaaaataatttaaatcgcaaatgtatccgtttttaattaaaataaatgctgttaatattcggaaaatagcttagaatattagtgatacctagaaaattaaaggagtttgatatgggaaagcttgaaaaacccgttattattggaattgctggtggttctggtagtgtgaaaacaacaatcgcacacgaaattgccgataacatcgatgatcaagatcgaattatgatcatgacgcaggattcttactacaaagacaatactggcgtatcaatggaagaaagaatgaagatcaactacgatcatcctgatgctttcgatatgccactacttgaggcacaattaaatcaattgatgcacagaaagccaattgaaatgccaacttatgacttcactgctcatcccgtagtgatgaaactattcacgtcgaaccagctgatatcattattctagaaggaattttggtactctttaacgaagatatccgcaatttaatggacatcaaggtttacgttgatactgatgatgatatccgttttattcgtcgacttgaacgtgatatgaaagaacgcggccgctcacttgattcagttattaatcaatacttgggcacggttaagccaatgtacaatcaatttattgaaccaaccaagcgttacgccgacatcatcgttcctgaaggcggcgaaaacgatgtggctatcgatatgttaactactaagttgcaatcagttttaagtgaataattatcgagatataacaaacaggcaagctaggaataatacctaacttgcctattttaatactctaaattatcttagtttttcttatcatcctgtgcattagctgcatccaaaatacggttatatttcttagcaaagaataccaaaagcaaaacactggcaataacataaataaccgctgcaatgtagtaagcattagcataaccatcttgcgtattaaacaagtaaaattcagtgaagagaccatcaataactccaacgatagcataggcaatttgaactacaccagtaaaggctggacgcaagtccttgtcaacaataaccatctgaacttcttgctgaatcggcatcgtggcattggctaaacctgttctcaagaaaagcagaattgcgacaatgacgaataagaaggctccgctacctaaccggcgaccattagctaacaaaagcataaccggtacacaagttaatgtacctgcagcaaccgacacgattgcaccgagtttcttttccaaaaatggagcaaagaagtaaccaattagcattgctgcttgaacaaaagtgttgatggtagaagtaacatcacgtggaatgtgcaaataactattcaaataaattggcacataaacggcaactaaacgagcaccaagttggataccggcaatataaacaatccacatcaatgtcttcttgctcaaaagcttcttatacatggccaccttttcaactctgctaggttctttatcatctgcagtagaacgatagtcacgtggtacatcgtgaataaatagggctaagataaaggctaacatcgttacagcagctgtaatataaagtaaaattctgtatgaatttgtatagtcagctaaagtttggccggttaacatttcagaattacctgatagaactgaagcttcgtgataaggaatccctctaattaagccaaagaaccaaacaacagccttcccacctaagaaagtacaaattgtctgcgtaatcaagttaacaatcataacggttgagaacatcttagttctaatcttccctggaacatatgaagtccacatcagtggatacatcaaatcataaaccccaattgctgtccaagaaatagtataagcgatcatgatgataatttgattggttgtgatacaggttaaggccataaaaattgccgtcattggtggcaagatcagcaaaatctttcgatagccccatttatgaaccgtcgcaatcatgactgacatcaaaattgctgtcgccgcattaaaaatgtttaaacctgaaatcaagtgtggcgctacaatcttgtagtaagacaaggctgcatcattcgtaatccctgttactgcacctaaaataccataaatccataagtagacaatgacattgtgtttataacgtggattccaatttttaatcgcctcatcctcagcttccttttccgcattgcttcgtcgagccatataagtccccttccccttttatgaaaacgtatacaaatatctaatttaatcttagcacctatatagtattaataaagtgtgtgtatacgaaaaggtattgattatatgacttaggcaagccttggctttaatgctttatcaaatagattagtaatcaattttactagtacaccatcaaatactaatgatgaaatcatgctgacaataaacatcaaaatttggacattaatttgatagtgactccaaccaaataagaagtagctgggaataaagccacccaaattagcaaaaaaggcaccggtcaagacacttttccaagagaatctttcataacgttcctttttagggaaaaagccaatttcattcattgccccctgaattaatccttcaaaaattgtcaaagctccccattgtccgccgatcgccatttctacagtcgcagccaataattcaccgattgttcctgcacccttagtcggtacaaaatacattgctagtggtgccgccatgtaccataatcctgtaaaaatattatccactactggtgcataacccgtgggcaaaaaactcaatttcaccaagttatacacattattaaaaccataagtgtaaatcacgcccatgattattccaattaaagccactaaaataattgactttacattccattttgacgatctagtaaacataaaaatgctccttactaacatactgtcagtaggagcacacaaataaaagttaattctcttgttagcactttcccttgcgcaagtattatcttgttcaggttcgaagggtattatctcagcattacgcacccctagtgacatttcatttatttatcaattaagtcaagtatagcacattgttaatcaaatgccatttgatctgtgtaaagtttgtaataaaatcccttttctttaagcagtgcctcgtggctgccttcttcgatcacattaccatcttttaacacaacaatcttattagaattcaagatcgtctttaaccggtgagcaatcacaaagcttgttcgtccagcaatcacagtatccattgccttttgaatcttttcttctgttaccgtatctacgttagaagttgcttcatccaagattaggaatggtggattcgttaaaattgtccgagcaattgacattaattgcttttgtccagttgaaaagattgagctagcatcgctaacttgagtatcgtaaccatcaggcaaagtctcaataaaatcatggatattagcctgcttagccgctgagatcacttcatccattgaagcattcggcttaccataacgaatattgtccgctacagtaccagtaaataagacagagtcctgcaggacgatcccaacattatttcgcaatgatgttagttgaatatcacgtacatctgtcccatcaaaggttactttacctgaattaacatcatagaagcgatttaacaggttcataatcgtagttttacctgaaccggttggtccgaccagagccactgattggcccttatcaaccgaaatatttactccgtgcaaaatttctttatctttattgtagccaaaatgaacattttctagcttgacaccatgattcaaaccactaatgaccttaccatttggcacttcgttttcatctttttgttcttcaactgtagctaatcttcttgccccagttaaagctaattgaatcatggaataaattgaagtaatttgcgtcaaaggttggaaataaacttgtgaatattcaacgaaagttacaatcaagcccaatccaatagcctgagaaatttgaccggaaataatcatccaagaccccatagcgatgacaattgccaaattaagtaagttcaatccgttcatcaatgggaataggattcccgaataaaattgccccttaaacaaagcgattcttactttattgttgtagaccttgaagccatcaaccgattcttgacgcaaaccattggtaataatcaccttttcaccattgatctgttcggtaatataaccatttaaatcgccaatttcatcttgctgcttatcgatataaacgcgagcttttttcattaaaaggacactaataatcaaaatgaatggtgttgtcgcaatcgtagtccaagccaaagtactattaatcgtgaacatcacaataattgttcccacgaacataattccctgggaaataatttcaaaaatcgcattgttcattgcgttgaaaatattatcccaatcggaagtaagtagcgataaaagtttaccatcctgatgagtatcaaagtagcgcactaacatccgttgaaacttggcaaatagattctcacgcatgtcattagttgaatccgcattgaacttggacattaccatccaagcaataaaaatcgctatctggctcaataagtaaaacaagaacatcgaccataacgcgctatagaacgtgttcatggatgctgtacccttttttaaatcaaccaaataagtagttaaagcagtaactgaacggcctaaatatgtaggtgccataacctgtgcaccactcgaaatcagagaaaggataactacaatagtgattcccttccaataaggcttcaaatacttagcaaaatagcgcaatgcctttttcgtattactcatttattcatttcctcctttcttacctttttgtgtcttgaagatttcttggtaaaccagcgaagtcttaagcaattcttcatgcgtaccttgtgccactaatttaccgtcatctaacactaaaattgtatcggcattaatcactgaaacaatcttttccgcaataataaaagtagtagtatcaggcagctcatgctctaaagcttgctgtactttcttctcactttccgcatccagagcagaagttgaatcgtccaaaattaaaattggtgctttagcaatcaagccacgtgcaatagatagacgttgcttttgcccaccggaaaagttagcagaacgctcctctacttcatgatcgaaagaatcgttataacgctcaataaattctgatgcttgcgccatattggcagcacgctgcaattcatgtaatttagcctgagcattaccttgacgcaaattagatgctattgtacctgagaaaagaactgctcgctgcaacacaaaagaaacagttttgcgtaatgcagcttcagttacatccttaatattttgaccgccaatttttactttacccttagttggatcatataaacgagcaattaattgggccaaagttgatttaccagcacctgttgccccaacgataccaaccatttgacctggcttaatcttaaacgaaatatcctttaaagtaggatcatccccatcaggataagtaaaggaaacatgatcaaactctacgctaccgctaagaggtgcaaccgaaccactttccacaaacttgacatctggttcagtctccaatacctcacgaatacgtccaagagaaatattagctcttgaaaattgcattaaggtcattccggcaatcatgatcgtaaatagcagggttaaaacatagttcacgaatggactgactaccgcaatatcacttggatgtgccgtaatatttttaccaattaaataaacaattaaagcaattacggtataagcgatcatctgaaaagctggcataattgcagagaaccagtaaccaatcacaatgttgtagtcattcaattggtccgaagtttgatcaaactttttaatttcttgtggaccttgattaaatgacttaaccactctcacaccttgcaatgtttcttgtgcttgattagaaattcggtccatcatttcttggaatttggtaaacaaactattcatttgtcttaaaacgtaagcgccaaaaccaaaaataagtgcaaccatgaccactggtgcccaccagaagcgcggaataatcacgatacagaagataaatgaaccgacaattaaaatcggcaaccgcaacatctgcataaatagctgcatcatcatgttcattacctggttcatatcgttgatcaaccgtgtagttagagaacctgctgaaaatttcttaatattaccaaaagagaacgtttgaatcttagcataggtatcttcacgtagatcactaactactccttgtgcaattttcgctgcaaaataaacgttaaaaatacccgaaataattgcaattatacctaggactactagccagattccatcagacaagactgcttgcttctgattcgccatcaatgccttttgaatattttccaataatttaggctgatataatccagaaaacgctgaaactaagatagcaataattgcacaaacaacatcttttttataacgctttaagtatggaagaattattttaaagttttccatttttactcctttcttcacttaaaaaatgccaaaaagtagtgctccattcttctgaaagcttagctaacaatttcattttgtcagttcccatggcttgagccgttttttcctctaactcaaatagaggacgcaacctgtcataagcatatttccgccctgcttcggtaagctggcaaaatcgaactcgcttatcgctaggatcaacagtcatcgtgatatgatcatgatcacgcagaatcttaattcctttgttaatcgactgcttgggtaaatcactcagatttactaattctctttgtgtcaattttccccgaatcagtaattcatacatgattaccactaaatagtcaggcaagtcatgatcctgctcccattggctataagcacggctgccatggataattgatagatttaatttttctgtctcactaattttcattacttcaccaccatatttagtctacatgcataccaaatatattagtatgcacatggactattgtcaaatcattttgtcaaaaataagactataattaaagtaaagaaacaatttttgcatctaaatttcaaattggtataataaaaaaatcatcaagtaaaacaaggcagggattatatgcgtaaaaagtttttattaataatttcaatagtggtcctgtttgctttgccattaagtggctgtaagcaaaacaaaaagcaaaacgtttatcaagcagttaaaactagtaaaaccattaactggggcgtcaaagccgacacgccattattcggctcaataaatattaaaacaggcaaacttaatggctttgaaattgatttagctaatgcattaacccatgaaatgctaggcaaaaatgtcaaagccaatttcataacaacaacggccaacaccaagattcagcttctaaaaaacacgaatgtcgacgccgtcattgcagcaatgaccattacgcctgaacgtaaaaaacaagtcgaattcagtcacccttactttcctgctggacagtcaattatggttgctgacagtagcgccattaaaaatgctaaaaatttgaataacaagaaagtgcttgtagttaaaggaactactgccgccgatgctatccatcaagttgctcctaaagcggaaattttacaattcgatgattacggccaagcttttgccgcattaaaagctggacaaggagatgcctttgtaactgataacggaattttaactgggattttgcgtgatagttccggctataaattagttggcggcacctttaccaaccagccatatggtattgcagttaataaggggcaaaatgacatgctcaagcatatcaacactgcattagcaaaactagaaaagaatggcacatataatcacctagttaaaaaatggtttggcaacattcctggtatgaacattaaagaactagaaaagaagtaagaaaaaggctaagatcaaaattttgatcctagccttttcgcttatttagcaatgaaatcaagtaaagtaaacattacatctttatttttctcaggcacaccatgattaataatctctgtaggcgtttgatgtaaatccttattttctaaagcatatgctccatcattaatagcaatctcacgtacattatcaatttgcggttcaaagtggaactgcaacccaattacattatctcccagtaaaaagccttgattcttaactagatcactagagaataataacttagcttcggttggaatttcactcatttgttcatgccaatgaagagctgttaacttatccggaattcctgtaatagtctgatcttgcaaataaactggtgcccaacctacttccttagcgggtgcatcaagtaccttatagcccaaagttttagcaatctgctggctaccaaaacaaattcccaagatcggcttgtgttgatctaacatttgtctaatcaacacacgttcatttttgacccaatcaagatcatcattaggactgtttggactgcctaggactactaatagatctgtttcatcaacagttggcaaaataccaaaattccctggatggtaaacgaacatttcgttatctctagcatggcaccaggcttgaatagaaccaggtccctcattaggtgcatgctgtaatacattaacgcgcataaaatccctttctcactcaacaatatttttgtttttcattttatactcaattctagtggtaaacaagaagaattcagttaatcttttactatatctttagaaactatatgtcaccttatatgatataatgttatacatatttttacatctggaggacttttatggacaatcaccttaaacgcagtattggcttaggttctgcactttcaattatcgttggaaccattatcggttctggaattttctttaaacaagcttcagttttagatagcgcaggctcaacctttatggcacttttagcatggattttagctgggattatcacattaaccgccggcttaacgattgcggaaatcggtgcccagatgccttatactggtggactttacgtctatattgaaaaaatttacggccgcgttttaggttttatggctggttggatgcaggctattgtgtacggtcctgctatgatagctgcagttaccggttttttaagtattatggtgactaatctctttggcatcggcaccgaatggcgtattcccattggtttgatcactatcatcgctatcggtggtttaaactttttagaaaataaagtcggtgcagcctttgctataatcactacaattgctaagatgatccctatttttgcaattatcttctgcggcatctgctggggtgagcaaaacgctgtcgcccaaactgtgactgagctgaatcgatcaacaggtggtcttggcgtagccgttctcgctgccctttttgcctatgacggttggatctttattgctaacttaggtggcgaaattaagaatccacaaaaattattacccaaagcaatcatcattggaatcactacagtattagtaatttacgcgttaattactattggtatttttagtttcatccctgccgataaaattcatgcattaggtaaaaattcaaccacttatttggctgacgctattcttggtccaattggcggtaaagttctatctgtcggcattattatctcaatgctaggcactctcaatggagaaatgctcacctttcctcgtattatttacgctatggctaagcgcggggatttgcctttctcaagatttttatcatacgttacacctaagggaaaagcaccagtcattgccactatgctcttaattaccttaactggaattatgatgactttcttcgatcctgattacctatcaaatctctgcgtcttcacaatttatagtttctatgttttagcattctttggcttattcattttaagatacaaaaataaggaccaacgtcctttcagcgtaccgttttatcccctaattcctttagtagcaattgcgggcgggctcttcgttttagtcagccaattcttcaatgatcccgctggcgttttgctttttactggaattaccgctgtcggctggccaattttctttttagttaaaaagatgagcaaagcacagaacacgattatcgaagactaaaaatctcaaatttttcttgttcatttttaataattatgatattctaattaaaattaatttaggagattcaattatgatttatcaagacaccacattggcatactcatctagctcaagttccaactgaacttgagtgattttggtgtacgtaaatcagcagccggattcactcaatcgtttctagacgataaggtgaatccggctatttttgtataaaggagaaaaaatggacaacaagcttaaacgcagtattggtttcggctcagctttttcaattgtaatcggaactatcatcggctctggtatcttttttaagcaggcttctgttcttgacagtgcaggttcaactacaatggccttactagcttggatttttggtggtctaattaccttggctgcaggtctcaccattgccgagataggggcgcaaatgccctacactggtggtctttatgtctacattgaaaatctctatggccgcattttaggctttatggctggttggatgcagatcatcgtgtacggtcctgcaattattgccgccgttgctggttttatgagcatcatgatgactaacttttttggtttgaatcattcatggcgcattcctttggctttaatcacagttttagcaattggaatcatgaatttcttcgaaaataaggtaggtgcaatcttttcagtcataaccacgattgccaaaatgattccgattgctgtaatcaccatttgtggaatctgttggggtcaacaagatgcgattaaccagactgtagcagaggttagccaacacactagtaacttcggtgttgctgtcttagcaactttatttggttacgacggtatgaaaaagaacagaccaaaaagtataagaatgatccaactaagctaatcaactggtactacaatgaaaaagatgattattacattgatcatcatggcgtcagattcaatttcaaatattacagccagcgcaaggatcgttctactggtcaggtccgtgattttaaggtttatgaggcagacgagttccagctaacgccagaattggaacaattggctaaaacagctagcggccgccagcgccaagttcgctataatcctaactggcaatatttaaaagaaaaagcaaaagaagttctccaaagcgaagaaggcagacacatctatggcatgagaaaatatgatgtagagccagttttcggacatttgaagaacgtatttggcatgcgcagaacgcacctgcgaggtaaagagaaggtcgaaaccgatatcggaattgcctttatgatgatgaatttgaacaaatattgtcaaagaaggtggctgaagggccgatttttattgttaaaaattttaaagagaacaaaaaaacgatcaagattcttaaaaaaggaaatcttgatcgtttttattcatctggaagctagttttttcccagacactttttgatttactttatttgtttatttagcgaaatcatttctaatagactctgagcagtagaggaaccttcattgccagcttttaagccggatcgttgcaaggcttgatcaatattctcagtggttaaaataccaaaagttattgggacttctgctttaagattcatctgcataattgcgtttgtaacattctgaataatcatgctgtaatgatcagtctcacctttaatgacagcgcctaaagtcataataccatcgtagttatttgaattgagaagcttattagcagtaaaaccaatttcaaaagcacctgggacccaatagatatcgatctgatcttcaagtactccaaattgttttaagctagcaatagcaccatcaactaaatgatgggtaacaatttcgttaaacttagatgcgacaattgcgatatgataattattgtttttaaaatttccttcgtaaatattcatttctgtgttccttactataatgctcctaataaatgatggaatttatctcgtttggtttctaaatagtcatgatttacctcattagcaggaatctccaggggaattcttttttcaatagtaataccgttattttctaattgatcaattttatcaggattattagtaagcaaattgatatgactaatacctagatcttttaaaatcttggcagcaataatataatttcgttcatctggcttaaaacctaaaatttcatttgcttcataagtgtcataaccttggtcctgtaaaccataagcttttaatttgttaattaatccaattccgcgtccttcttgtcgtaaataaagaattatgccactaccatttttattaatttgcttcatggcagtatgtaattgatcaccgcaatcgcagcgcattgagccaaacgtatcaccagtgaggcattctgaatgaagacgtactaaaactggctttttaggatcaatctttcctttaataatagctaagttttcattggcgaaagccttaattttgaaattgccatatttagtaggaaggtttacaaattctgagcgtttactcacaggactattaatatattcttgtagttctgcaattgttaaaaatggtaagtgatattctttagcaatttctttcagttggggacgacgagccatatggccatcagctttcataacttcacaaatatatgcaacttctggttcgccagcaagatgagctaaggcaatagaggcttctgtgtgaccattacgattcttgatttgatcatctttagcgactaatggaaaacagtgacctggtctaaagaagtcttctggcttggaagtaggatcagcaattgccttgatagttgccgcacgatcataagcagaaataccagtagtggtggttttgtaatcaacactgattgtaaaagctgtaccatatggatcagtattattttgttccatttggtagaaatttaaacgttgggcaattgttttgcttacaggggtgcaaagtaagccacgagcatgtttggtcataaagttaacattttcaggagtaactttagaccctaagccgatcatatcaccttcagattcacgatcttcatcatcagcaacaatcactaaaccaccatttttcatccattgaattgcattttgaattttttttacgtccattttaaattctcttttctaaatttttagcgacatatttacttaagatatcagtctcaatatttacttctgagccgacatttaacttacttaaatttgtttcatcttgtgtatgaggaattaatccaactgagaaaacattatcatgtgtatccattactgttagcgatacgccattaattgcaatactaccttgtgctacaatctgattttttaagcgagtaggaaaggcaaaccaaacttcaatagcattttcgttagtcctgatttccgtaactttggcaatatcatcaatatgtccagtaactagatgaccttctaatctttgtccgacctgtagtgaacgttcaacatttaattgggcattgatatccaaattcttaaaagtagttttctgataagtttgtggcatcatcgttactacaaaagaagtatcagtgtattgctcaacagttaaacaggttccattaactgcaattgaatcgccaatttgcaagtttttagtaaagtcgggctggcaagcaacagtcataacaatagtttcatcgtttttatcaatagcagcaattcgtgcgtcgccgcgtactagaccactaaacattaatttcaccttcaattctaaaattatcatccaacttttcagcacgtaaattatgtaaagttgttttggagctgggtgaaattcctagctttcctttttgaccaagtaaaattggacttatgtaagtaattaaattgtttacttgaccttcggctagcaaggcattagctagggtaggaccaccttcaacataaaccgactggatctcttcattggtcagtttttttatgacttcggtgattgaagcgtttttcatcaaaaaaattgagatattttcattatgtggagtcttagctaagcttgtattttgagtaaaaatccaagttggacttaacttatccgttaataacttaatatttaaatgattcagtaatctaccacgtcgatctactattattcgaatgggtggaaaatccgtagtgacagtagtcagtaaactaggattatcgataatggcagtatttgatccaatcatgatggcttgataatttgcgcgctctctatgtactcgctgataaacagtttcatttgttatttgagtgcgaatatttttagcctcattaattcgataatctaagctgaccgcctgtttcaacgttatccatggatgattatgttggtagaagtaagtataaaacttgtttagcttctttgcttgatcttctaatacgccaaccgttacttgaatattgtgttgccttaacttggcaatacctttacccgttactagttgatgtggatctacttgcgcaattaccactcgtttaattttgctagagacaattaaatcagagcagggtggctgcttaccataatgactgcatggttctagagtaacgtatagggttgaattaaataattgttctggagttagttttgaaatagcatcacgctcagcatgataataaccataacgaatatgatgacctgtagccaagatattgccatctttaacgatgacagctccaaccatggggttcttccatgtttgatagagtccttttttcgcttcttggatagctaattgcatatatgcttcatcactgttttccatttctttcacttcctaacagaacaaaaaaagaacctcgaagaattacctcgaggttctaactaacattcaaaaaataatttaagtacagttcctactatcaaaatagaaaagagcacagcaaaattattcttcttccatctagactctaactatcggtaccattaaaggattcaaccgcttatgcgggttgcggactttaccgccggtcgggaatttcaccctgcctcgaagaacattatttaattcattcttagaataaaaccgctttctaaatttgtcaataacttttttaattagaaaaattccaaaggtgataaaatacgctaaatctttttgaaattccttttagtgattattgagggttctataataaaatgaattaacaaaagcaactaatgaacacgagagtgataaaatgaataccaacaaattaactgaattacttaataagatgaatgagtatcgtcccttagatcaagcacaggtaaaggctctagaacaagtcaaaaaagagacaaatttataggatacgcgtggtgctagttaaatcgttttagttaataaaaaagtccaattagactagactcaagttgtaagtaatttaaatagaaaagagtctgatctaattgaactatctcaagcttaagcgtttttctcaccatttacaagttagttttaatcggttaaatgtgatttgtcgctcgctgtataagctttatgcgcctgatggacttaaacatcgtaaaaatgttgatcagaccaagcttcctaatagttctatcttagcgatgctcatttggcaaactgaaattggaattgaatctcaacgaagattctgtaaattcttcgttggcttatctcattctcgttttaaccgtcgagctcgaatgctcttgcctctaattcgttgtatccgtcaggcttggaatcaagaagtaaagacagctggagaatttttgattattgatagtttcccagtgccagtttgccagcctgttcgcaattatcgtgtcaagatctttcggggcgtagctgatattggttataaagcaaccaagaaagtctattattatggcttcaaggtccacgcaatagtaagcgatgatggctatctgcttgactatgcagttactaaagcgtcagtacatgatgccaaagagacagtagaattgatgatcaatgctcatccagccaaccattatcttttaggagatgaaggttatttaagcaaaaatctagctactaatctaaagcacatgggatatgtgctttggacgccatatcgtaaaaatatgcaaggagctagaaggcataatgatcatcaattgatggcaattagaagaagcattgaaagcgacttttctttgcttagttattacaacgctgagaataatcgagcaagaagtccagtaggctttcaacagcggctagaaatagctattttagcttataatatggcatattgtctagaacgatttaactagcaccacgcgtataggatatttattgaaaaatcaatttaattagaaaaaactctaaaatgaagaaaatttcatttgatctacattaaatcttggtttttaaaggttccttttttcgtaaactaagtgtacaaagttaattaatacgaaaagcgaggaattcaattatgaaaaagtttaacattaaaaaagtatcattggcagcagctgcattaggcttagcagcgggtggcgcaagtttattggcgattaaccaggctaatgcttctactggcactcaaacgcaacagagtcaaagcaataacacagaacaaaatcaaagtaatacaggtactgcaagtattaatctttctcaagaagatgcagttaataagttttatgaaaagtatggctcaaaatcaattaaggagattgaactagagcaaaagaagaattcatatgtgtatgaaattgaaggttttgattcacaaaatgaatacaaagttaagattgatgcaagtaatggcaatattttaaaagctgaatctgaaaaattagattcagatgatgaggcgcaagcattagatcttaataatatgatgactcgagagcaagctactcaattggctcaaactcaggtatcaggtcaacctgttgaatggtcattagaaattgatgatgatcagccaatctggaaagtagaatttgaagatggaggtaagaaaaccgaagttgaaattgatgctaaaaatcagaagattataaagactgagactgaagatgatgaaaaagatcatgacaaggattatgaaaaagaaaaaaatgacagtcaagagcaccaaaatactgatgaagattaataagtaactaatagttagaaccgtttgttttaagcaagcggttctttttcataaatgaaattactatacgttttttgaatagtagcatttaatattagtaattttatagacagtctgttttgattagactatgtatataaagtaaacgatagtaaggagaaataatatgaaagcagcagtttttgtagaaccaggtaaagttgaagtaagagaagttccaaagccaaaaatcgatggtgaaaatcaagcaattattcgtgttatacgtgcaagtgtttgtggttcagacttatggtggtttagaggaattgctgatcgtgaaagtgggtctttaattggccatgaggcaattggtgtcgttgaagaagttagtgatgaggtaactaatattaaaccaaatgattttgttctcgtaccatttactcatgaaactgtcaaatcttttgtgtaaatagttctttctcgtaaattgattttttaatcatttatttaatcaaaataggattctaaggtatcctgaacctgaccaaagcctttatgaattcggttgaaatagcggtcattgtagctcattgcctggatgccaataaatgcatcaagcgactgttcagttggaaattctgccttaggcttagctttacgcttgatgacgttgttaaaggattcaatcatattggttgaataaattgaagctctgatttgtttgggataattgtagaagaccagcagatcgggctcaatttccttcaaacctttgatgacattgctataagctttattccatctggcatagaatttgtgcaagacagctgcagcttcttttttgcttgtctgttgatgtatctgcttgaattcgttcatgatcttttcgcggtcatccacccggactttagcacagatattgcgcatgacatgaaccaggcagcgttgaaaatgagctttaggataagtcctggccaaggctgttttcatgccaacaacaccatcagaaagaaagagttcaacttgcttcaagcctctggacttcatgttttgaagcatctctgtccagacttcaatgttctcactaggagcaatgcagtagtcaatgacttccttatgtccattaggtttaatgccaatggcaatatatactgcttcacgctcaaacgtttctcggcgcaaaggaaggtatgtcgcatccaaatagacacagaaaaacttgtcgcttagcttgcgcttgtgataagcctcaaccttggggagcatctgcttggaaatatttgatacttgagctggactataatgactgccatacattttctcaatcaagtcagcgatttctctggtagttacgcctttggagtagagcttgataatcgtgctttccaaaacatcagagtgctgcttgtagtcaggcagcgtgtgctgatgaaactgaccgttgcggtctcgaggcacttgcacttcaattggtccaaactgggtatcaaccttgcggaaataagcaccatttctagaattgccagtattccagccatttctggcatagggatcatagcctagaaaggcagttaactcagcttctagcaagttattaacagcctgttgtagctctttgcgcaataaatcatttattttgtctggattgaatagagcttgagcaaaatctttggtaaaatcattcatgaaggagtttttctttctgtatgtgtttttttgttcaaaccaatcatacgagaaaggaactcctttttctaatgtttaaagaaataaatttaaggaattattcatccttacacaaactattttacagtctcttactcatggatatggtcattgtgttgcatgtattaatggttttgaaggcaattgcttgaatttgaagccgggtactaacggtggctatcaagccgaatttatgaaatatgaaccagcaaactctggattagttaagattcccggtaagccaggagattatactgatgatcaattggcatcccttcaaacattgtcagatgttatggcaactggttaccacgcagcattaaacgctgaagttaagaagggcgatactgttgcagttatcggtgatggtgccgttggtcttgccggtgttattggtgctaagttgttgggcgctgaaaaaatcattcttttatcccaccacgatgatcgtgcacaattaggaaaagaatttggtgcaactgacattgtttcaagtcgtgatgatcaagcagttaaagatgtactggctttaactaaggaaaatgctggtgctgatgcattcttagagtgtgtaggtgctgaaagtgcaattgaacaagctggtcaaattgctcgtccaggtgcggtaatcggtagagtaggtgtaccacatgcagagcctaagtcaaaccaattattctggaaaaatgtcggtcttcgcggtggtattgcttcagtaactaagcctgataaagaagttcttttacaagctgttcttgatggaaaaattaacccaggaaaagtatttactaagagttttgatttagatcatatccaagaagcatacgaagcaatgagcaatcgtgaagcaattaagtcattgattatcgtgaacgaaaaataaataatcgcgcaaagcgtgcgtaaaaacggtcgaaaataaaatcgaccgtttttttgtgtgcgaaagagtataattgtagataaaatagattggcaaggtgacttaagtgagagaaacaaagaatttagaatttaaagagaatcttacaaacacatttttaaaaacggttagtgcgtatgcaaattatggtacaggagaagttaaatttggtataaaggatgatggaacaatgaaactgtcaaatcttttgtgtaaatagatctttctcgtaaattgattttttaattatttatttaatcaaagtaggattctaaggtgtcctgaacctgaccaaagcctttatgaattcgattgaaataacggtcattgtagctcattgcctgaatgccaataaaagcatcaagcgactgttcagttggaaactctgccttaggcttagctttgcgcttgatcacattgttaaatgattcaatcatgttagtcgaataaattgaagctctgatctgcttgggatagttataaaagaccagcagatctggttctatgtctttcaagcttctgataacatggctgtaaaccttgccccatttggtatagaagtcatgcaggacagctgtggcttcttctttgtttgtctgttgatgcacctgtttgaattcgttcatgatcttttcacgatcgtcgacgcgtactttagcgcagatattgcgcatgacatgaaccaaacagcgttgaaaatgagctttaggataagtcctggccaaggctgttttcatgccaacaacaccatcagaaagaaaaagctcaacttgctttaagcctcgggatttcatgttttgaagcatatctgtccagacttcaatgttctcgctaggtgcaatgcagtagtcaatgacctccttgtgcccattaggcttgatgccaatggcaatatagactgcttcacgctcaaatgtttctcggcgcaaaggaaggtatgtcgcatccaaatagacgcagaaaaacttgtcgcttagcttgcgtttgtggtaagcctcaacctttggaatcatctgcttggaaatatttgatacctgagctggactgtaatggctgccatacatcttttcaattagatcggctatgtccctggtggtcacgcccttggagtaaagcttgataatcatgctttccaagatatccgagtgctgcttgtagtcaggcagcgtgtgctgatgaaactgaccgttgcggtctcgaggcacttgcacttcaattggtccaaactgcgtatcaaccttgcggaaataagcaccatttctagaattgccagtattccagccatttctggcatagggatcatagcctagaaaggcagtcaattcagcttctagcaagttattaacagcctgttgtagctctttgcgcaataaatcatttattttgtctggattgaatagagcttgagcaaaatctttggtaaaatcattcatgaaggagttcttctttctgtatgtgttttttttgttcaaaccaatcatacgagaaaggaactcctttttctaatgtttaaagaaataaatttaaggaatcattcatccttacacaaactattttacagtctcggaacaattattggtgtaaaaaatccaattgatttttgtttaaatgtagagaataaaataaatgattccatccagccacatccagattataatttagagattgatgataaaactaatgtagtcacgttgacggtaaaacagggcgataatccaccatatttatataaagcaaaagcttataaaagaaatgatagtgcttcaattgaagtggatagaacagaattatcacaactaattttgattggcgaaaataagacttatgacagtttaacagctgcaaatcaaaatctatcgtttaatattttagaaatggcactaaaagaaaaactaggaattaataaattgacatccgatgtgctaattactcttaatctagaacagaagaatgccggatatactaatgcgggtgaattattagcagataaaaatcattatcgtgggattgatgtcgttcgctttggtgaaaatattaatattatgctggatagggcaaactatgagaatgaatcaattcttaaagagtatgaccaaactattcaaaaatatcggcagtattatcagcgtgaggaaatacatggtgttactcgtaacgttataagtcaaattcctgaagaagcttttcgtgaagcaatagctaatgccttggttcataggacttggaatattaatgctcaaattaaagtttctatgtttgataatcgaatagaagtagtttctccaggaggattacctcataacttgagtaaagatgagtatctgtcaggtcaaatttctattttaagaaatcctattgtggctaatgtcttttttagattgggtttaattgaacaatttggtacaggaataaagagaattaaagattcctatcaaggaagtttagttcaaccacagttcgagatctttgaaaattcaataaaaataattttaccaattctaaaatttattactgatgatttaagcgatgatgaaaagaaagtatttagaaccattcgcgagggtgcaaatacttctacacaaattagtcgagcaagtaattttggtaaaacaaaagttttaaatctacttaaacaactaacaaagcaaggttatgttgagagaattggtgagggtagatctacaaaatatgttttaaataaataatcgcgcgcaaaacgtgcgtaaaaatggtcgaaaagcaaatcgaccgtttttttattgcttagttaaaatctcgtaactccaattaatcagtttgttattataagcaattgctatatttttatctcctgatttgattaatttaattaattttagattctcttcagaaatagaattaacatcgacttcattacagatccattcacctaaagttaaatagattgatttaaagttattgataagcaaaggataaacataattcttggaggccaaggctaaactatgtacataagcaaatatttcttgtgcagcgtccttggaattggtggctttggcaagattttgcatatttgaaatagctgattgcaggcattgttcatcctgttctatacaatctaagcgaacaacatcattttcaattagtttcctgatttcaaaaatcgaatttaaaagtgaaattcggtaatgtcccccgtagaaattaataatttcgttcattgtttgcaaatcgccatcgacacgataatctgctacaaaagccccatatctaggacgaatttctataaaatgtaatgccgctaatttttttaatccggaattgatcacagttcgacttacttgaagttgttcttgtaaaactctttcactgggtaatttatcgccgaggttaaactttcctgttaagattgctgtttttaattgattaacgaagaataaatctgttgcagtgggtacatttattgggtgaaatttcatattattctcctttgcactggtaggaccagaagccaacggctagtttatataaaataactttgtttttctttactttgatcctttttttaattcatattaattataatgaaaacgtaatcatttgaaaacgaaagggttaaaaaatggctgaaaaatatgatgttatcgtagttggggctggcaatggcggcttaatggccgccgcaagttctgctagaatgggcaaaaaaactctattgattgaaagacataatctggctggtggagcagcaaccagttttattcgcggcagatttgagtttgaagtagccttgcatgaattatgtgaatatggtcatgctgataatccgcgtgcagtacgaaaaatgtatgactggttaggtgccaacgtaaaaatgcaagaattaccagatacttatcgctatattatttatggtaaagacggatttgatgttaagatgccagctggtagagaaaattttattaatgcgatggaaaaatatgtaccaggtacttcagaaaagatggaaaagctttttgatctgtgtgagcaaagtatgaatgcgttagcagaaatagcagatggaaaggataaaaaagaagttataaaaaaatatccagcttttatcgagtatgctactaagagttgggatgatgtgcttaacaaattaaaacttcctaaaaaagctcaacaaattcttggagcatattggtgttacattgatattcccactgatgaatttgaatttccgtattttgccactatgttagctacttatgtagaaaacgatgcctatattcctcaaagaagaagtcatgatatgtcaacagcattggcacaagtaatttatgataatggtggtgatgtttggctgagtacaactgtagaaaaaatcttagttgaaaatggtcaagctgttggtgtgcaaattaaaggtgaaaaagtttttgctaaggaagttatttgtggaattactcctcacgcagtttatggcaacatgatggatcaaaagtgtattcctgagtatgctttaaaatatgcaaactcacataaattaggaaccagtgcctttttggtgtatcttgggctaaataaatcctgtcgagaacttggaataaatgactatagtgtgttcattgcttcaacaggtgatactagaaaacaatatgaaaattgtaaaactatggataaaaatgattttatgatcatgaattgcttaaatactgtcattccaaatgcttctcctaagggaactagtgtttgctacattactaaattagttgatgatggtgtttgggataatgttaaacccaaagattatgaaaaacttaaagttaaaatagctaaaaatgctattgatgagtatgaacaggcaacaggtattaaaattagtgattctatagaagagattgcaattgctgcaccaccaacatttgctcgctatatgggaacacctgatggtgaaatttatggctatcattgtgcaccatgggatcaaattattggtagatcaatggatttaaagaacgttgtaaatccactgccacatttatatttctgcgggggtcatggatttatgtgtgatggttacaatgtttcatacactactggtttaactgcagcaaaaatagctgttagtgatattaataatatgggagcagatcatgaataaatttgaagagattaagggaattattgatttaaagaagcttcaaaatgagcgaaaacatgaaattcaaaatgcttcggatgcagagttgcctaaaaaatatccgatgaacattcttgaagaggagcttcatcctgaaacgcaatatttgaaaatcactaagattattgaccgtgacgatgctaagagctttgtatttgtaccagatgaatcaaaaggtaccagcaaacttgcatatttccaagcaggtcaatatatttctttaaaacttcatattggtaaaagttattgtacacgtgcttatgccatttcaagcacacctaagcaggcgctttctggcgaatatatgctcacaattaagttagtcaaaaatgggtatgtaactccttatatttgggagaattggaaggttggcactgaagtagctgcttcgggtcctgctggtcaattattctatgaaccattaagagacaagaagaccattattgctggtggcagcggtattacaccattttactcaatggctggtgcaattgctgatggcacaattgatgcaaatttgattattttatatggaagtagaacgcacaaccatattttgttgggtgatgaattagatagaattgctgccaaaactgataaggtcaaggtcgttaacatattaagtgatgaagaagtagtcatgtggtaataagtcaatgtaaaagttaaattttatttttaattagtttgttttaaaaccaaaatttgcgtgcatgaaactaagccctatttcaagggattttttaacaactattatttactcctccaaaaatgttttagaccaattaatcacctcggtgtttgatagatttgaccatttttgagcagagtgaaaatggtcctggttaattttcttgcacaaagaacgcaagcgcgtttatgcggagaatagaaagcttcatcgtatttcttttgatagtacttccgaaaaacgggatctctttgtctaatcaggttggcagcttcaaccaaataatatcttagataatgatttccgtttttagtcatcggtttgtgttcgctatcaaaattactagattgcttttgacgccaagctagaccagcgtatttagctagctgtgcttcagtgtcaaagcggtcaatactgccgatttcagcgataataccagcggaataaactgacccaattcctggaatagattgtagtattctctcttcaggaagcgtttggacgatatctgtaattgctttatctaagttcttaatcaatttctgattagttttaatttcggcatagtaaacagataatacggcatcaatcgagtctttcatgactttacctaagcgatatgatcctctaacggcttttctgatcgctttagctaaagtctctggatcagagaagcggccacgtcctttggtttgaaggtagtcaattagatcctcgattggcatttcagcgatttcatcgatggttttactatcagtaacaattgacagcatcgttgcgccaaagatagaagttttaatattgtctttgtcaacggtaactagtttgtttacacgataataaagagtttcaatgaagtgctgcttagctctagtgagcgaagatgtgatttcatatctagctctagttaaacgctgtaaagctaagtattcctcttgccgagcaatagtgacatggtatttaccaaagcgtaagtattcagcgatgtaataggcatcagtaggatcattcttattttcttcgtaaacgtcatgaaatcgtttagtgtttttaggattaatgacatcagtttcaagattaattttttgtaaatcttcgtcattggcaaagaaataagcagggtgaaagctatagattgaagtggcttccatgccgataattactttgtcatagctgttctgtttagcaagttgaagaattatctttttgacctcattagcaccaatcaggtcattagaaaaagattggttaagtaaaggtttttgataattttctgagtcagtaatagcgacttgaagatcttttgaactaacgtcaattccgataaaaagtttcattgagaatggcctcctttctagcaaatatttggtcatagatcgatcatcacatgttagtccctaattacagattctaagacaatctcgcaaaatataagtattcataggttcaagctaaaaagctgcgactgaatctgctctgaatcagtaatagccagaatcgatacagcatgtgagtaagtcattagtaaaactgcttgggcggcagactaaaaaagtagtcaaagctacagaaggaaacaacctataccaattgaccaaggtcaatgacaattagagactagcatctgatgatcgaataaacaaactaaaagaataatcattatcactgatttaatttatataatacgatacgcgtggtgctagttaaatcgttttagttaataaaaaagtccaatcttgttagactcaacttgtataataatagaaaagagcctgatctgattgaactgccttaagcttaagcgttttagccaccatttacaagttagttttaaagatttagtgataatttgtcggcactggtatcgtttgtatgcaccggctgagtttactcatcggcgaaatattgatcaaattaaaactacggacagtctgattttggctttacttatctggcaagctaagacaggaattgaatcacaaagaagattctgtgaatgtttcaattgtttatcacactcacgttttaatcggcgttcacgtcagctattgcaattgatttatcagatacggcaagaaatgaataaaaaggttgacctgaatggacagttcttgatcattgacagctttccggtacctgtttgccaaccaattcgaaactatcgtgctaaaatttttcgcggttatgccaacattggttataaggccaccaagaaaatttacttctatggtttcaaagttcatgccattgttagcgatgacggttacattcttgattatgtcgtaacaaaggcatcagttcatgatgccagggagacagttgaactgatagaaaatacccatccatctaattactatcttcttggcgacgaaggctatttaggcaaagaactgcatcaacagctaaaacaaatgggttacgaactttggacaccatatcgtaaaaatatgacaggagctaaaaagcacaatgatcatcaattgatggctattcgcagaacaattgaaagcgacttttcgcttctgacctattacaatgccgagaacaatcgagcacgtagtctgataggctttcaaagccggttggaaattgcaattttagcttataatttggcttattgtctagaaagatttaactagcaccacgcgtaatacgatttaatttatataatacgagaaggatatgaacatggctttatcaatcaggccatcattgaaaaatatgctccagcagataagaattattctatttatatgagtggtccagctgcgatgattcattttgtaaatcaagaaattaaaaagttagatcttcgtccagggcaagtaagacaagaaatgtccggttcagtaaatccatactttttcaagaattatcctgaggaagcaaagaataagactttcaacatgacagttaaaacccgtgatcaaatacaagttattccagcaagaagtgatgaaagtttgctggtggcaatggaaagagcaggtattattgccccttcatcatgtcgctcaggcgtttgtggtgcatgtcgttcaagagtagttaatggaaaagtatttattccatttcctggacgtcgtgcagccgatagtgaatacaactatgtcaacacttgtgttacatttctaatttctgatttaacacttcaagtgccagttcatgactacgcgagactgtaaaatagtttgtgtaaggatgaatgattccttaaatttgtttctttaaacattagaaaaaggagttcctttctcgtatgattggtttgaacaaaaaaacacatacagaaagaagaactccttcatgaatgattttaccaaagattttgctcaagctctattcaatccagacaaaataaatgatttattgcgcaaagagctacaacaggctgttaataacttgctagaagctgagttgactgcctttctaggctatgatccctatgccagaaatggctggaatactggcaattctagaaatggtgcttatttccgcaaggttgatacccagtttggaccaattgaagtgcaagtgcctcgagaccgcaacggtcagtttcatcagcacacgctgcctgactacaagcagcactctgatgttttggaaagcacgattatcaagctctactccaaaggcgtaactaccagagaaatcgctgacttgattgagaaaatgtatggcagtcattatagtccagctcaagtatcaaatatttccaagcagatgctccccaaggttgaggcttatcacaagcgcaagctaagcgacaagtttttctgtgtctatttggatgcgacataccttcctttgcgccgagaaacgtttgagcgtgaagcagtctatattgccattggcatcaagcctaatgggcacaaggaggtcattgactactgcattgcacctagcgagaacattgaagtctggacagatatgcttcaaaacatgaaatcccgaggcttaaagcaagttgagctttttctttctgatggtgttgttggcatgaaaacagccttggccaggacttatcctaaagctcattttcaacgctgcttggttcatgtcatgcgcaatatctgtgctaaagtccgggtggatgaccgcgaaaagatcatgaacgaattcaagcagatacatcaacagacaagcaaaaaagaagctgcagctgtcttgcacaaattctatgccagatggaataaagcttatagcaatgtcatcaaaggtttgaaggaaattgagcccgatctgctggtcttctacaattatcccaaacaaatcagagcttcaatttattcaaccaatatgattgaatcctttaacaacgtcatcaagcgtaaagctaagcctaaggcagaatttccaactgaacagtcgcttgatgcatttattggcatccaggcaatgagctacaatgaccgctatttcaaccgaattcataaaggctttggtcaggttcaggataccttagaatcttattttgaataaataattaaaaaatcaatttgcgagaaagaactatttacacaaaagatttgacagtttcgactacgcaaacatgttaggttaaaagtcaagactgaaaataaaattttttttgcgttatattatctatatgttgtatttgatagttaagcagcaataccaaatgtagaaaaagaggatttaaatggcaactttagagatcaaggatttacatgtagaagttgaagacaaagataaaaaaacgagtaaaaagattcttaaaggcgtgaacctaactctcaagacaggtgaaattcatgcaattatgggacctaatggaacaggaaaatcaactttatctgagactatcatggggaatcctcgctatcacataacgcaaggcgatattttgctaaacggtgaaagcattattaacatgccagttgatgaacgcgctagaaaaggattatttttagctatgcagtatccagcagaagttcctggcgtgactaatgctgaatttttgcgggtagcaattaatgctcgccgaccaaaagatgatccgatttcagtgatgacttttttgaatgaattagataaaaatctggatttgctagatatgaaggaagccatgaccgagcgttatctgaatgagggcttttctggcggtgaaaagaaacgtaacgaaattttgcagatgttaatgattaaaccaagttttggcattcttgatgaaatcgactcaggtctagatattgatgccttaagagttgtatcacggggagttaatgccatgcgcggtgacaactttggtgctttaatgattacacactaccagcgtttgcttgattatattgtgcctgacgtggttcatgtcatgatggatggacgtattgttaaagacggtggaccagatttagctaaaaaacttgaaaaagaaggatatgcaggtcttcgcgatgaacttgggttacatattaagttagttgatgaaaattaggggggaaaacgtcaaatgttgagcaaagaaaacatacttgtctcatcaaaggaaaacaacgagccttcctggttaactgatttaaggactagttcttttgaaaagatgcataaactttcttatcccaaaatgcagcgtttttcctatcaagattggccgttgattgctaaagaagattttaagtggcaaaaccaacctgacttttttataaaaaaagagaatcatgatcttcttaacgataagggaatcatcttatgcgatctttttacagcaataaagcaatatccagatttagttaaatccgcattagcttccgttattaaaaatgatgaagataaattaacggcttatcattatgcgtatttaaattcaggcttatttctttatattcctaaaaatacagttttagccgaaccaattacagttactttgaaccctacgcaagatccatatatttcacatttattgattgttacggaggataacagtcaagtgaaattcttggaagaaattcaaaatgaggataaagcagttaaatccgcaaacttaatggtggaaatcgttgcacatccaggtagtcatgttgaattttcatcccttgatgaaatggataaggatacaacgctttactttaatcgccgtgcaagaattgaaaatgatgcacatgttgaatgggcaattgcttttatgaatgactgcaacaccttaggcgatttggattcagaattaattggcgaaggcagttatgcggattctaaggcaattgcagttacaactggtgatcaaagagtcggtattaacaaccgagtaaccaaccgcgggccacattcaactggtttgataaatcaacgtggtgttttacttgaaaattctcaactaatttttaatggaattggtcagattgttcatggtgcacatggctctaaggctgatcaacaaaatagagttttaatgatgtctgataatgcacatggagatgccaacccactgcttttaattgatgaaaatgatgttattgctgctcatgcggctagtgtgggtcctgttgatcaaattcaaatgaattatttaatgagtcgtggtattccatatgatcaagctcaaagattggtaattcgcgggttcttaggggctgttcttgatgcaattcctaataaggaagttcggcaaaagatgattgatattttggaaaaaaaattaattgatggacaaactagacgttaagaaaattaaagcagattttccaattcttaatcaaaaaattaatgatgaaaaattgatctatcttgataatgcagcaactagtcaaatgccgttagttgtagaaaaacagattgaacattttactaattttgatcgcgctaatgttcaccgcggtgttcatactttagggctaagggctacacaaaaatatgaaaatgcccgtcaaaaagtagctgactttattggtgccaaaaatgcaagtgaaattgtatttactagtggttgcacagatagtttgaacttagttgcggcaacttatggtgagcaaaatatccaagctggggatgaaattgttgtttcaattatggaacatcatagcaattttttgccttggcagcagattgctttaagaaagaacgctaagttaaagtttattgaaattgatgctaatggtcgtttagatctggaagatgcaaaaagtaaaattactacaaaaactaaaattgtagcgattactcatgtaagcaatgttttggggacaattaatcctattgcggctttaacaagcttagctcataaaaatggcgcgattgttgtagtagatggcgctcaagccgtcggacactttccggttaatgtgactgatttagatgctgacttttatgcattttcaggacataaaatgtttgcgccaactggagtaggtgtgctttatggcaaaaaagctctgttagaacaaatgccgccttatcgttttggtggtgaaatgattacaaatgtaactagaaaaggagctacctgggcacctgtgcctcaaaagtttgaagcaggaactccgaatatttctggcgtgatcggcgtaggtgccgcaatagattatttaggaaagttagatttaactttaattcaaaaacatgaggatagtttaacagcatatgctttaaaagaattatcaaaaatagatgacttagtggtgtatggtccaaaagactgcagtaatcgtactggtgtgatttcttttaatttaagaaaaattcatccacatgatttagcaacagcacttgatttaaatggtgtagaagttagagcagggcatcattgcgcacaaccattgatggaaagccttaagacagaatcaactgtacgtgctagtttctcaatctataatacaaaaaatgatattgatcaattggttagttcaattcaagaagcaaaggagtttttcggtgagcttagataaattaaaaagtttgtataaagcagttattctcgatcatgctcaaactccacgcaattttggacaacttgctaattatactaatgaaacgactgtttataatccaacttgtggtgataagattcacttaactattttggttgagaatgatcaaattaaagatattgcttttgatggggaaggatgcactattagtaaggcttcagctagtatgatgacccaattggtaaaaggaaaaaatattgaacaggctattagtttttctaggatattttcagacttagcagctggcaaaaaacgtagtgaacaagacatgcaaaaactagaagacgctcaagtcttgataagtattatggaattcccggcgcggattaaatgtgccaccttggcttggtggggattagatcgagcattacttggtaaagaaaacgaggatgaggataatgactaaagcagaagaaatagttaaagatgaagattatcaattcggctttcatgataatgtaaaaccaaaattttcaacgggacatggtttaacagaagatgtaattagacaaatttcggctgaaaagcatgagcccaagtggatgttagattatcgattaaaggccttccatatttatgaaaaaatgccaatgcctagttttggtcctgatctttcgggtttagacttagatgatatgctttattatcaaaaaatgactgataaaaaatatcgtgattggaatgatgtaccacaggatattaaggatacttttgaacgcttaggtgtaccacaagcagaaagaaaatatttagctggttcagctgcccagtatgaatctgagatggtttatcacaagatgaaagagcaatttgataaattagggattatctttacagatactgatactgcattgcaggaatatccagatttattaaaaaaatattttggcaaattagttccaattgatttaaataagttttctgccttaaactgtgctgtttggtcaggtggcacttttatttatgtacctaagggagttcaagtccctgcacctgttcaagcttactttagattaaatgcggaaaattctggtcaattcgaaagaactttgattatcgttgatcaagatgcacaccttgattatgttgagggatgtactgcaccacaatattcatctgactctcttcatgcggctgtggttgaagtaaatgtgttggacaatgcatattgccgttatacaactatccaaaactggtctgataatgtttatagtttggaaactaaaagagccgttgctggcaagcatgctacgatggaatgggttgacggaaatttaggtgccaaggtgaccatgaaatatccgagcgtttatctaaatggtgaaggagcacgtggtaccatgctttcgattgcagtggcacaccacgggattcatcaagattctggagcagggatgtttcataatgcccctaacacttctagctcaattgtttctaagtcaattgccaaaggcggtggctcaactgattatcgaggaagtgttaagttttctaaaaagtcggacggttctaaggcgcatgttgaatgtgacacgattattatggatgatcaatcatcttcagataccatcccaactaatgcgattgaaaactcaaatgtggcgatggaacatgaggcaacagtttctaaaatttctgaagatcaattgtattatttggaaagtcgcggtatttcagaaagaaaagccactgaaatgattattatgggatttgttgaaccgttcaccaagcagctgccaatggaatacgctgttgagcttaatcgattgatcagcttccaaatggaaggagcaattggttaatgttagaaatagaaaatttatctgatcaagaaaaagatgtttaccaggcattaaaagatgtaattgatccagaattgcaagttgatattgttgacttaggcttgatttatggcattgaggtaaatgatcatctttgccagattacgatgacactaactattatgggatgtcctgtgagtgaatggctgaataacgaaattaccaaggcagcagagagcgttgcggaaatcgatgattgtcaaattaaactggtctggtatccgcaatggaatccaaatatgatgtcgcgtattgctcgaatgacactaggaatccatggataggagcaccattgatggaaaatcatagttttatttcatatgctaatggtaaatcgctagctgagattaatagtacgattgcggttcctaaaactaagaatttctttagaatgctttttgcttatacgggacctggcgcattagttgctgtaggttatatggacccaggcaattgggctgcttcaatcaatggtggacagagctttaactttttactgatttctactattttaatttccagtttaatggccatgctgttgcaatatatgtcggctaaattaggaattgttacgcaaatggatttagcgcaggcaattcgtgctagaactagtaagagattgagctttattctttggattgtaattgaattagcaattatggcaacagatgtggcggaagttattggtgcagctattgccttaaaccttttatttaaaattccactagttatagcaacatttatcactatttttgatgtgtttctactattattattgtcaaaggttggtttcagaaaaatagaggctttgatttcatgtttgattatggtgattttatttgtttttgcctatcaagtcatgttagcagagcccaattggagtaagatcttcttgtctgtttttccgagtcccgaactagttgcacaacatcccgtggttaatgggctttccccgttaacaggtagtttaggtattattggtgccactgtgatgccgcataacttttatttgcattcttcaatttgccaaacaagaaagataaatcatcatgatccagatgatgtcaaaaatgcagttcgttttactacttgggattcaaatattcaacttattctagcattctttgttaacgtgcttttgctaattatgggagcagctgtttttaaaagtggagcggttaaagatagttcattttttggactttatgatgctttaagcaatactgcaatgctaagtaatccaattttgatttcagtagctaaaactggaattttatcagttctctttgccatagcacttcttgcttcaggacaaaattctactattacagggactttaactggtcagattgtaatggaaggcttcattcacttgaagatgccactttgggcgagacgattatttactcggctattatccgtaattccagttatcatttgcgttgttatgacagctaacgacacaatttctcagcagcactttgctctcaacatgcttttagaaaattcacaagtcttcttagcttttgctgtcccattttcgattgttccattattaattatgactgatgataaaagaatgatggggcaattcaaaaataggagaagctggtcggtcttaggctggatcagctcgattattttaattttcttgaacttatataatttgccggcaacctttgtttcatttaatataatgcctaagcaagatgccaagattttcgcttatgctattattgtactgattattttattgctggcttggacctgctgggatatggaaaaaagcaaaattagacattaaaagcatttcataataggagaagcaatgtaataaatagtttagatttcattttagcaagtgtaatagcttactttttattatgtaattagatctaaaataaaatcaaaaaatctgaagaaatttaaaatggaggaaaaactatagaagccaaaaatctatttgatactaactttggtaaagttccccaaatatatttagggagaaacaaagtagtcgaaaatgtagttgaatcatttgaagatgttatcaaatatcgattatttacgggatgcgtggagtaggaaaaatttctttattgtctgatattacatcaaatttaactaaaaaaataattcccggatttaaaattgaagtgcaacactaagtgttaaacaaaaaggccatgaagacctaaacttgaagtgacgaaaaatcaagaaaggaagatctttatgaccaattcaaattctagcatttctaagcactatcatcaattaaccagcgtacaacgtggacaaattcaagcaatgctggattccggcataacttcccgtactgttatcgctcaagaagtcggctgccataagtcgacaatcagtcgcgaaatcaaacgcggaagtgtcctgcaaagagacagcagctatttattgtatgagcactattacgctgatactgcacagatttattatgagaagcgtcgcaaaaactgctatcagcgcaatccattgaagcattatgctgtctttttgagaatgctctccagacgctttaaagctaaatttgatgccaccagcatcgatgagttcgttggtgaattcaaaaggactatgccaggctacccttgtcccagcacaccaactgtctatcgctatattgatcagggcttgctggacataagcaatattgatctgcctatgaagctcaaaagacgcaggaacaagcgtcatcacagccatggcggtcacgctttgcacaagaagcatcttggcaattccattgaacagcgtcctaaagagattgaagacagaaaagctccgctgcactgggaaggagatctggttaaaggcgtcagacgcaagaatcagcctgctttaatgactttgactgaaagaaccacacgctttgaagtagttatcaagattcctgactatcgggcaagcacatgaaagacaagtcaaaagcttatgttcaacaggcaaccaatgccattaaccacaaatatcgccgaatcctccaatatcagacagcagaagaactcttcaagcaatatatctcttcataacctaactgttgcacttaatttgacaattcaggaagaattaattatcatatttcccgcaaaaaagttgttgtgcaaaattatcctatcaaagaaacgggagctacctacttgctaaagccatatgagctactagtagaagaaacttataattagacctttgagtcaccaagcgtattagtgcttcggtggctttttacttgtgtgtcgggcatgacatttcatctaatccaatgaaagtttggaccacgggtatttgtcgccaagtgtagtgaaccacaagccgatagcggtgacgctatgggtgaaggaagtggctagcgagttttccgagcctacgtacagaaacctggttaggccaaatggcggataaggctgcgatacaagtcgaagtccaaaagacaaacgtaaagtcaagacggtaaaccaggaggcagtggaaaatcaaagatgaatgtcttaccccgagagatcttgcggacaggcaagctgagcaagctttaacatcagcgatcgtaagcctggtcgaaaaaggttagtcgcaagaagtcagctgaggtcatagtagtgttgaaagtcttgtaatgagactggagcgaaggacctaatgtttgtaagagcatatcccgctataagcaatgttcagatagtccgaataagaggatagcctagcacaaagagaacgtaactctttgatggtgaaagcaattgggatgattctgaataaatttacaagtagaaatggagatattacgagatgaaattaattgaacagattctaagtcagagcaatcttaaagaagcgattcatagagtcaagattaataaaggtgctccgggagtagataaaagaatggttgaagaacttgatagctatttcagaaagcatcaagcagaaattaaatacgcaatcatgaagatgatggatatcaatgggtaattgatttagatattgagaaatattttgacacggtcaatcatgataaattaatttcaataattagagaacgagtaaatgacaaaaccaccctccatttgattcggtcattcttaaaatccggtatcatggaagatggtttggttaagcccaataagattggcgtgcctcaaggcggaccgctttcgccaatcctgtccaagctttataacaagattagagagcttctttgtcgcaggaaagcagctgctcaacctctatcgttagtctttactaaggtaaatcaagtggtcagaggttggattaactactttaaaattggcggtatgaaatactttctatttaaattcagtcaatggctgcgccataagatacgggtagtaatcattaaacaatggaaactgccaagaagaatatacactaatttaatgcggattaacaaggcattaaagtgcaattttagcgacgaagatattcataaagtagctaatacgcgattaggttggtataaacgcagtaccggacatgttgttaactttttgcttagcccaaaagtattgggcataagcaaagcggatcgcccaggcttggtcgatccgctagaatactatttatctcgtagatgattacaaacgtagcgccggatacggaaccgtacgtccggtgcaatgagaggggcgagaattaatctccctctactctattactttatttgtttatttagcgaaatcatttctaatagactctgagcagtagaggaaccttcattgccagcttttaagccggatcgttgcaaggcttgatcaatattctcagtggttaaaataccaaaagttattgggacttctgctttaagattcatctgcataattgcgtttgtaacattctgaataatcatgctgtaatgatcagtctcacctttaatgacagcgcctaaagtcataataccatcgtagttatttgaattgagaagcttattagcagtaaaaccaatttcaaaagcacctgggacccaatagatatcgatctgatcttcaagtactccaaattgctttaaagtagcaatagcaccgtcaactaaatgatgggtaacggtttcgttaaacttggatgctacaattgcaacgtgataattattgtttttaaaatttccttcataaatattcatttctgtgttcctcactatagtgcttctaataaatgatggaatttatctcgtttagtttctaaatagtcatgatttaccttattagcaggaatttccaagggaattcttttttcaatagtaataccgttattttctagttgatcaattttatcaggattattagtaagcaaattgatatgactaatacctagatcttttaaaatcttggcagcaataatataatttcgttcatctggcttaaaacctaaaatttcatttgcttcataagtgtcataaccttggtcctgtaaaccataagcttttaatttgttaattaatccaattccacgtccttcttgtcgtaaataaagaattatgccactaccatttttattcatttgcttcatggcagtatgtaattgatcaccgcaatcgcagcgcattgagccaaacgtatcaccagtaaggcattctgaatgaagacgtactaaaactggctttttaggatcaatctttcctttaataatagctaagttttcattggcgaaagccttaattttgaaattgccatatttagtgggaaaatttacaaactctgagcgtttactcacaggactattaatatattcttgtagttctgcaattgttaaaaatggtaagtgatattctttagcaatttctttcagttggggacgacgagccatatggccatcagctttcataacttcacaaatatatgcaacttctggttcgccagcaagatgagctaaggcaatagaagcttctgtgtgaccattacgattcttgatttgatcacctttagcgactaatggaaaacagtgacctggtctaaagaagtcttctggcttggaagtaggatcagcaattgccttgatagttgccgcacgatcataagcagaaatacctgtagtggtggttttgtaatcaacactgattgtaaaagctgtaccgtatggatcagtattattttgttccatttggtagaaatttaaacgttgggcaattgttttacttacaggggtgcaaagtaagccacgagcatgtttggtcataaagttaacattttcaggagtaactttagaccctaagccgatcatatcaccttcagattcacgatcttcatcatcagcaacaatcactaaaccaccatttttcatccattgaattgcattttgaatttttctaacatccattttaatttctcttttctaaattttttgcaacatattttccgataatgtcggtttccaaatttacttcatcatttatctgtaagttggctaaattagtttcgtcttgagtatgtggaattagacctaccgaaaaactgttatctttaacatccatcactgttaatgaaacgccatttaaagcaatactaccttgaggtacgatctgtgttgataatcgggcaggaaacttaaaccaaatttcaattgcattttcattctgtgctattttagtaactgttgccaaatcatcgatatgtcccgtaacaagatgaccttctaaacgttgaccgacttctaatgaacgctcaacgttaagttgatcaccgttatgcaaattcttaaaaacagttttcttataagtctgaggcatcatggttacaacaaaactagtttcagtaaaactttcaaccgtcaaacaagtcccattaattgcaattgaatcaccgaccgttagctcattagtaaagtctgcagggcacgaaacggttagcttaattgtttgcttgtgtttatcaatttttttaatatgagcatccccgcgaactagaccactaaacatgttttaattcacctgcaattcgttcattgttgccaaaggctgtttttttaacatttgttaaagggacagtttcgtttggtactaaacctgttacgccttcatctccaagaaagatcggcgccgtatatttaattacttcattaacaaaaatttcattcataattgctttttccaaagtagggccaccttctacataaactgactggatttcttttgtactcaaataatcaaatacttcttggatcttgtttgttgctaaatgaataattttgattttagaattagtaaagttgtttttagacatttgcttattttgagtgaaaatccaagtgggatttgtatcacttaataagcgaagtcgtaaatgatttaacagccgtccgcgacgatcaatgataatacggattggcggatagtcacttttgacattagttcttaaaatagggtcatcaatgatagcagtcgaagaaccaatcataattgcttgataatctgcacgttcagaatgcacttgctgatacactgcttgattagtgattggagttcgctgaccgcgcattgcaactttattatctaaactagttgcttctttgactgtgatccagggaaacccatattggtaaaaatagctgtagaacttattaagtttacttgcgtcatcagctaaaacaccagtagttacttgaactccattctcttgtagtttggcaattccttttccagtaactaatttgtgtggatcgatttgtccaactacaacacgtttaatcccacttttgataattaaatctgagcagggaggctgtttaccataatggttgcatggctcaagagtgacatagagagttgaattaaataattgttctggggttaattttgaaatggcatcgcgttctgcatgattttgtccataatggtgatgatagccagtagctaaaacttgaccgtttttaacgattacggcaccaaccataggatttttccatgtttgatagcgaccttttttagcttcttctaaagctaaattcatataaaaattatctttttccattaaaatcacttcctcgtagaacaaaaaagaacctcgagtattctcgaggttcagtaataatattcaaagtcaaataatcaaggcaaacgcaaataagcgttacttattggttattattcttctatcatctagactatactatcggtaccgattatcggattccaccgctttcgcgggttgcggacttcaccgccggtaaggaatttcaccttgcctcgaagaacatttatttaattcaactttatcgtaaaactgaactagctaaatgtcaataattaatttaagcggttacaaacaaaaacagattaaataagggagcgatcggacatcaagctgcaaagatgatgaagaaatcgattaatgcacgcaatcgcatggataagaggattgcagaaaaagaaggaatgctaaagaatattgaaaaagttcctactatgactatgaattttcaggcagattatcatcgtgagattttgcaacttaatgatcttagcttgcaactaaaaaatagtagagaactatttaaaagcttgactttgtctttgaataatcatgaaattattgctattgaaggtaaaaatggttctggaaagtcaacattaattaagtatttactgggtatctctcaaaatctaattgccaaaggtaattatgagctaattgaaagtttgaaaatctcttatttaccacaagaatttgtaatgtatagcggatcattaaaagactttgctaaaaaatatcatttgtcttatgaagctttgttgagcaatcttaagaaaatgggatttgcgcgtgctgattttacaactagaattgaaaaaatgagtatgggacaacagaaacgagtagcttgggctaagtcattgacagaacctgctaatttatatttatgggatgagccagcaaattatttagatgtattcaatcaagatcaattaattaagcttcttaagagtgtgaagccaacgatgttactaattgagcatgatccttacttcattacatcggtagctgatcagcagattaaattaacaaattaactaggtatttctataaaataatcttattaggaaaagtaaaattgtaagatatattggttggaaagtccgattatcataggcataataagctatagaggtgataaacatgaaaaatgaattttgtcacgataaaatgaaatgtcagaaaaattgtccttgtgcagataaggatggcatttgccactgcaaaatggtaaatagtaaagaatgtgtttgcaaggaacaagaaaagtaacaaaagagcgccagtagatttagtttaagtttactggcgctcttttaaataaaaatcacataattttgttgcgtttaactggaaaaagaaatgaaataactggaactattaaataaagaatcattgctagtttggcattgaataatgacagaatgatcaatactacatttaaaaataaagtaaccgtcatttttctaataaaggagcggctaataataattcgcatgatttgggaatagcgcgcagtatgagactgtaaaatagtttgtgtaaggatgaatgattccttaaatttatttctttaaacattagaaaaaggagttcctttctcgtatgattggtttgaacaaaaaaacacatacagaaagaagaactccttcatgaatgattttaccaaagattttgctcaagctctattcaatccagacaaaataaatgatttattgcgcaaagagctacaacaggctgttaataacttgctagaagctgaattgactgcctttctgggctatgatccctatgccagaaatggctggaatactggcaactctagaaatggtgcttatttccgcaaagttgatacgcaatttggcccaattgaagtgcaagtgcctcgggatcgcaacggtcaatttcatcagcacacgctgcctggctacaagcagcactcggatatcttggaaagcatgattatcaagctttactccaagggcgtgaccaccagggaaatagccgatctaattgaaaagatgtatggcagccattacagtccagcccaggtatcaaatatttccaagcagatgattccaaaggttgaggcttaccacaaacgcaagctaagcgacaagtttttctgcgtctatttggatgcgacataccttcctttgcgccgagaaacatttgagcgtgaagcagtctatattgccattggcatcaagcctaatgggcacaaggaggtcattgactactgcattgcgcctagcgagaacattgaagtctggacagatatgcttcaaaacatgaaatcccgaggcttaaagcaagttgagctttttctttctgatggtgttgttggcatgaaaacagccttggccaggacttatcctaaagctcattttcaacgctgtttggttcatgtcatgcgcaatatctgcgctaaagtacgcgtcgacgatcgtgaaaagatcatgaacgaattcaaacaggtgcatcaacagacaaacaaagaagaagccacagctgtcctgcatgacttctataccaaatggggcaaggtttacagccatgttatcagaagcttgaaagacatagaaccagatctgctggtcttttataactatcccaagcagatcagagcttcaatttattcgactaacatgattgaatcatttaacaatgtgatcaagcgcaaagctaagcctaaggcagagtttccaactgaacagtcgcttgatgcttttattggcattcaggcaatgagctacaatgaccgttatttcaatcgaattcataaaggctttggtcaggttcaggacaccttagaatcctactttgattaaataaataattaaaaaatcaatttacgagaaagaactatttacacaaaagatttgacagtttccgcagtatttttagcaccaaaatattgaattagatattctaagattttggcaattaaaaaaacaattccaaagttagctacagcgaaagaagaattttcagccataatccatttagtcatgactggcagaagtgataaatcagctagaaaaaagaagtctagaatggcaatcgcttttgaaggtttgaaaatatagtatgaaaaagataaatgtagatcataccagaagtctgccacaataaaaaaagtgattaaaaagacagcaatgttgctaatgaattgctgataatgaatttcatgcagagcaggttgaatttctaaaacaataattgtaatgataatcgccatcactccatcattaaaggcttgtagatgttcacgtagactttcaggctctttcttttgggcctcagctaattcttttttgatattttttaatttatctttttcttggtctgagaactgattaaaattgtgtcttctgggatttcgtggcatggctattcctccagttaaattaatttattaatcaataattactttagcataattttttacaatcaagctaaaaactgagattgccaaattaatatcataatttgctttttggacaaatataaagcatgatagacagtaatcaaatattaggagggaatagtttgaaaaaaataatcgctaagcctgttggaatgtttgaattattctatgatttagtttttgtgtatgtaatttctcgaattactgcgatgattcatcatcctgttaatggcagtattcctttagttactttttttcaatttttattggttgtaattgtagtaatgcaaatttggctttatcaagttatctattttaaccgatatagcaaaaacagatttttagatattggcggtttagttttaaatatgtttgtagcagtttatctggctaacaatattaatactgaatggcgaattacttttcactattttaatattgcaatggctgttatgatcttaattttattttgtcagtatctatttgtaaaagcagataataatgataaacaagcctttttaattattttaggattggaatttatcttaattattgtaggattaatcatcggctaccctgttggaatttatttttgtataagtggttatattgttggttttattttgccattgtttttaaaagggatgtttaaagctgaacgagtaaattttcctcatttggtagagagagtaagtttaatcgtaattattgcctttggtgaggctattgttaatttgacaagttatttcaatagtaagacaccgttagtttatgctgcttttttgtttttatctttagtattaatgtttgcaagctatgttgtcttatcagatgaattaattgatcatcaccagataagtaaaggctttatttcaatgtatagtcatattgcaattgtagtcgcaatacttttgtcaacagtagcaatacagtatttacaagtgcagaatataaacaaaacttttttatttttcctgattattttttcaatggccttatattatttctcattagctataaatcaagtatataataagagtgaatgtcgatttagtattcgtaatctgttaacattgctactaatttttgcactaggagtaagttacttatgggttgtgataaaatctaaaataggtatttcaatctgcctattaatttggaatttgttatttttcttagaattttatattaaaggcaataaaaatgaattcagatgatcaatttatcaagtgggcgacagatttacaaagtttagctcaagcaggattgcattatggtcatgatgtatttgatcgtgagcgctatgaaaaaatccgtaaaattgcaggcgaaatgatggcagctaggacaggactacctaaagaacaaattaaaacactctttttgggtgatgagggctatcaaacacctaagattgatacgcgagcagcaatttttaaggataataaaattttgcttgtccgtgaaaaaatgactcaggaatggtcattgccaggcggctggaatgattatgaccaaactacagcacaaaattgtgttaaagaggcatatgaagaagcaggtagagtagttagacccgtcaaaattattgcagttcaagatcgtagtcatcataataaaccaattttggccaccaacattacgaaggtattttacttatgcaaagaaattagtggtgaatttaagccgaacgatgaaactgatgcttgtgattattttgcattagataatttaccgaagctttcacttgggcgaaatactgaggaacaaattaccatgtgttttgcggcaaataatgatcctaattggcagactcaatttgaatagaaaatttgaaaaataaataaaaaagttgttgacaacgattatattttgattaaaatagttattaacaaatttaataaatctgaaaacaaagagaaagaagagtaatttagacttaatttacagcgagtctcgttaggtgtgaggagataaatcctaagtttaaatgaaaatcactttcgagttctatttcttaacttaaagtaagaagtagtgggagcacccattatagtgcctacgtatcgtcaagtaattgactgtacgtgaaaggtattgctagcaatagtgatataaataaagggtggtaccacgctcaaagcgtccctcagttgcaatttgcagctgagggtcttttttgtttatcagggatgttttggaggagagaaaatgacagatcatacatcgaaaaaacttacatggaaaaattatctcgttgttgcttccttgctgtttggattattttttggggctggtaacctaatttttccattacatttaggacaactagctggagcaaattggggaacagctgcaattggctttttaatcacaggggttttattgccattattatctgtattagcagtagcaattactcatgcaaacggagtatacgacatcggtaagccgctgggtgccggatttgcagtagtatttatggttttaatccatgccacaatcggaccattgtttggtaccccaagaactgcaaccatttctttcacagttggtattgcaccatttatgccgaagaatatgcaaagttccgctttacttgttttctcagctttattctttttagctgcttttgctttttcttatcatcaaaataatatcttgtctaacgttggtaaggtattaaatccattattcttggcattattattcctagtgtttcttgtagcttttgctcgtccgttggggaatccacaaactgctgcagtaactgctgcttataagcatggagcattagtaaatggcttcttagagggttataacacaatggatgccttagcaggcttagcctttggggttacagttgttacagctgttcgtggcatgggacaaaaagatgctaaaagtgtttcaaaagttgttgctaaatcaggtgtcttggccgttttagcaatcggttttatctacttgttattgatcttaatgggtgcaatgtctctcggacgctttgcagtttctgataacggtggggtagcctttaaccaaatcgttaacgtttatggcggtgtctttggtcaagctttacttgcattcttattgacagttacctgtttgactactgcagttggtttggttgctgcttttgcgcaagactttcataagcattttcctaaggtaagttaccacgtttggttagcacttagttgcttggcatcattcttagccgctaactttggtttggatcaaatcatttcatggtcaacaccgatgttaatgttcttatatcctttatccatggttttgatcttgctatcagtttgttcaccattgtttaataaggcaggtgtagtttactttttcgtaatcctatttactgttgtaccagctttaggcgatatggtagttgctttcccaagtgtggttagtcaaagttcatttggtttagcagtggcttcacttagaaatcatttgccacttgccagcatgggcttatcatggttagtgccagcactggtaggtttagcaattggtttagttgtatatcatgttagaaataaaaagacagtaccggttttagaagaagactaaaatttgtgtattttagatgaaggcagtgattgccttcatttttttgcttctgagatgaatagttgtgaatagacatgataaaattaaaatgaaattattttaataaggagaaccacatgcttccagtacgatacggtattaacttagcaccagaaattaaagaaaataagattgatattattaagaatgagccttttactgtttgggatgcagatgtaataaatattcaaaagcaaaagtactatttattagttgaaaaagacactagttttccaattttattaactaaacttgataccaaactgtttaatgatgtttttgctaatgcgattaaaagctatgactttattttgtttaaacagcaacaaaaattagtttcagcggtaaagtccaagcaaatgtctttttacgatactaaaagccaagctagtttaatgctagaaaaaattcgtaaacttatagaggataatcaaagcgaatatttaaatttgattgatgttgtaaaagatgaaaagaatatcgtagataagctaactgtaatgtcagcgactatttttgccttggatagtcagattggacaaaattttatttctaagatgattgatgaggttagtacgtatttccctattaagccgcaaaaaccaaatcgaagatataagtatgttgacttagtgccaaaatttgaagatttctctaattttgaaaaatatgaaaataaaccagtaaaaggcaatgaaaagattgttgctaaaattaaagaaaataatcaaaaactcattgatcaatatgctaaatatgtaccagcaggaataggatatatccaacctgatcaaatgctgccggattatctaaatcattatttattacgtaataagatccatttagttactaatgatttaggagaagcgatttcttatttatggattatgatatctaacaataaactacatccgctagaaatagagcagattacaaatactttgaaaaatttctatgtatttttgagtagagtaggtcttattcgtaaaactgatagtaaagaaatagggatgaatattgactgggtagttgaagaaattaattcatactccgatcaaggcctggatgaggatttgataaacgatatgatagcggcaattgaagcaaatccgaaaaagattttggaacttgaagatttagatctgtcttctcaggatttgtctagaattttagaaggcttgcgaaaagatcttgagagtcatgataaaaagcagaaaacacgaaaaaagacaatttttgaaaatcaaactcgcaatcgagctacctatgaaattagagtaaaactaaagtcttttaaaccatctacttggcgtagatttattattagtggcaatacgtcagtgaaaacattagaagttgctatgctagatatgtttaatgcagattttggacatatgtttgatttgctgaataaaaaaacgcaggaacgctttgaaaatgcagaaagtatcgctgaagcgaaagattgggatccggctacaggcatagattatgaaaaagctaaggtttcgtattttgaaaagagagataaattattattaacttatgattatggcgatagctgggaattcgaagtagatattaagaacatcactactgatcaagcagctcctaagtgtccaaagatactttctggaaaaggttatggaataattgatgacattggtggtgtatggtctttgcaagattattacgatacgcctaaagataaagtagatcctgaaatgattgattggttaatgggtggaaaagcaattaatttagataattttaataaggaagaacttaatcaaagaatggaacaatataagaactaaagaaacatactaacctagtgttggatcatgaatcgacggattcacgatctggcactttttattttgtctaaaatagaaagtgaagataaagcaaatcaagtcttcagctttttagacacttgatgtcgtaaaagaaacggactgctttaccacctattcttaagtctcttcgaagtctgtgggcacttagatgccgtgtttagaaaattagaattaataggttgataaagaggtttatcttcacagcggaggttatattatggaatcacaaattattttcggtattgatgttagcagtaaatcttccacagtttgtgtggttaatgaccggatcaaacaaggcgaatcttttagaatctctaatgattcctttggctatcaaaaactttatgagcaactgaaccaatatttgataactcctttagttgttttcgaagctactggtgtttattctctaagcctgcaagctttcttagaggattatcatattaagtatttgaagcttaatccgcttaaagcgaaaaagctaatggacaataatttacgccataataaaactgataaggtagatgcttatcgcctggctttaattcaatttaatgccccgcaaaagctgcgtgatccacagcccagagagtatcatgaacttcagaatgccagtcgctattatgaagaacttactaggagtatagttactactaaaaatcaattgcaccgcaacctccaatccactttcccacaaattgaagaaatactgtctcatccatctggcagaatttattgggcgcttgttagtcttttcccacatgctggatatgttctagaaaagaatgagacacaggtaactcaaatgcttaattctatttctggaataggacaacaaagggcacggtacttaaccacaagattatacgcttttgctagagaagcttatccttatgattccaaagatagtattatcgttagagctattcaaaggaacatttctaatttattttcactccagcaagaacgcgactatgtaattaactacatggaaaagctggctaaagcagtaaacgctcgtgctttatccatctatttgagtatcccaggggttgctagaattacagcagtgagattagtagcagagctcggtgatctaagacggtttagcacttcagctcaaattgatgcgtttgttggcattgatccaggaaggtaccaatctggtgaaaaagacagttctcttggcattaccaagcatggcaatcatattgccagaaaaatactttatcgagttattactcaaatggagacggtaaaggctacgcagccttgccatataactgattattatgacaagaaaaaacgatcttcaaatagacaaggctataagaaaatcgccattgcatcagtccataaactgatacgcacaatgtttgctcttatcaaacatgatcaattatatgattacaacatagccaccgaaaataaaagactttagctgaaatcaaataatcaacttaagtataagcaacctatggaaaaactacaagtattcataggcttatttgtggtactttcgctttttcttaaatttaaactcttatttgctttaaccttattcgcatcattaaaacaagtaaatttattttcttaaatcattgataatacttgactttgggtagaaaaaaaagattaccttagcatatgtgtatgtactgaggcaatcttttttaaattttacagcaacttttttaattcatttacagcagtattataatcgggctcatgagtaatttcatcaacaatttcacgataaacgattttaccgttaggctcaagaatccacacactgcgtgctagtattccagattctggtattagtaagccagtagctttaccaaaagataatttttcatcagacattaattgcatatttttaacaccttcagccgcacaccaattttgttggtctttgatggtattagttgaaatagttaaaaagttaacgtcaggaaactgatccattgttttgttaaaagtcttagtttgaatactgcaaacggaagtgttgatgtctggcacaacgctgattaaagtatttttacctaacaaattatctttagtaacttcttgcttatttttgtctaaaactgtaaagttaggcatttcatcgccaaccttaggtggtgtgccaattaattcaacttcttttcctttaaaagtaactttcatgaaattcctccttttattatcttttaacttaaatatagcaaactcagttcaataacttaaatatttagcttacagatattaatttttaggattttaaattttagcatcctgtattttgaatttaaccacttatttaaatagtgaattcggaaaggaagactttttatgttaattggaacttttagcttattctcaataatgatgttgttaaataattggtctatcaatatttggacattgtttatttttattctttcatacgttgttatttggataacaatcaagttaacacaaaatcgccaaattaagaaacgtaatagctaattaataatctttattcattcgctttatgcatagctaactattaccaataaatattttttataatagttattttgatttacgatttttattttttaaatcatttaacgaaatactattttggcttgcaatgagagcattatttttgcgaaagagaattgcaaaagattcattagtaatttgcgtctcaattgcagaaccttgaatttgagtaaagaagtcgctattgataactattgcatctaattttccctcattaaatagattaaaattttcagcaaaaatatcgggcatcagataggcacttatattatcaaataccccgactcgtaaggtggttatagttggctttagcgcaattatttcttttaaatcttgaagtattttatctgacttatttttaaaagcaagtccagcagcagtgaggacaataccattagtattcctaataaataatttcttattgacaatagcttctagctgtctaatttttttactgacagtagattggtctaggtagagatagttgctagcttgactgaagctagcaaatctactaacaacatcaaaaatatgcagtagttcgaagtttagtttattcatttatgattaactccttattttgagtagaaataataaatctattttagcaacaaatgtaactaaaatccttttcttagtaaagaattgaaactgtcaaatcttttgtgtaaatagttctttctcgtaaattgattttttaattatttatttaatcaaagtaggattctaaggtgtcctgaacctgaccaaagcctttatgaattcgattgaaataacggtcattgtagctcattgcctgaataccaataaaagcatcaagcgactgttcagttggaaactctgccttaggcttagctttgcgcttgatcacattgttaaatgattcaatcatgttagtcgaataaattgaagctctgatctgcttgggatagttataaaagaccagcagatctggttctatgtctttcaagcttctgataacatggctgtaaaccttgccccatttggtatagaagtcatgcaggacagctgtggcttcttctttgtttgtctgttgatgcacctgtttgaattcgttcatgatcttttcacgatcgtcgacgcgtactttagcgcagatattgcgcatgacatgaaccaaacagcgttgaaaatgagctttaggataagtcctggccaaggctgttttcatgccaacaacaccatcagaaagaaaaagctcaacttgctttaagcctcgggatttcatgttttgaagcatatctgtccagacttcaatgttctcgctaggcgcaatgcagtagtcaatgacctccttgtgcccattaggcttgatgccaatggcaatatagactgcttcacgctcaaatgtttctcggcgcaaaggaaggtatgtcgcatccaaatagacgcagaaaaacttgtcgcttagcttgcgtttgtggtaagcctcaacctttggaatcatctgcttggaaatatttgatacctgggctggactgtaatggctgccatacatcttttcaattagatcggctatttccctggtggtcacgcccttggagtaaagcttgataatcatgctttccaagatatccgagtgctgcttgtagccaggcagcgtgtgctgatgaaattgaccgttgcgatcccgaggcacttgcacttcaattgggccaaattgcgtatcaactttgcggaaataagcaccatttctagagttgccagtattccagccatttctggcatagggatcatagcccagaaaggcagtcaattcagcttctaacaagttattaacagcctgttgtagctctttgcgcaataaatcatttattttgtctggattgaatagagcttgagcaaaatctttggtaaaatcattcatgaaggagttcttctttctgtatgtgtttttttgttcaaaccaatcatacgagaaaggaactcctttttctaatgtttaaagaaataaatttaaggaatcattcatccttacacaaaatattttacagtctcaaagaattagatgtgagttttacgtcaaatgatgaaatagatatttactagtatttactttgaactaaagtctcaaattagtaaaaaatatgtttgatatctaacaaatataaatgcaaaatatgttagacatctaacaaaaggaggacctatatggaaccgataaaaaaggttattaagcaatcttccattcaaatagatcgtgaacgagagacgtttgctaacactttgggtatcaccggcgttcaaatgacaactttagattttatttctaatcatcaaaatcaaactgtttcacaacatgaaattgaaaagaaactagatttaaagcgttcaacggtgacaatcatgattcaaagaatggagaaaagagatttagttaaacgcgttactaatgcggtcgataaaagacagaaggatgtttctttaactgctaagagtaaatcacttattcccaagataaaagattatatgcgtcaagatgatcgaaaagttcgtagtcattttacacaagctgaaataaatacggcactaaaagttttaaaatttgtcaaaaatggagaaaaaatggaatcaaataatgaaagaatatcatcaaaagtgtttgcagcagtaattgccacgggattaatgtcattttctggcgttctagttgaaacttcaatgaatattgcttttccaaccttgatgcgtgattttaatgtttcaaccaatgttgtgcaatggatgacttcaatttatttgcttgcagtttcaattatcgtgccaatctctgctgcattaaaaagttcatataaaactaaaagtctatttttaaccgctaattttttgtttttacttggcttaatagttgatgctactgcaccaatttttccggtgctattgatcggaagagtaattcaaggcattggtactggaatcgccctgccattaatgtttaacatcattttagaacaagtgcctaagggtaaagttggtactatgatgggtgtcggcagtatgatcactggaatagcaccagcacttgggccgacctttggcgggattgttctacaggaactgaattggcgctaggttttttggtttttaattccattgattattatttcattgttattaggcatctggggtattgaacaaaaatctgctgttaaaaaagttaagattgatcgccttagctttatcataattgcaatcttctttattgggatgctggttggctttagcaacttaggaacaggacaattgggtgcaactgctattcaaattttgattgctttattagctttagctctgttaatttggagatctaatcgaattaaaatgccaattttggatctaaaattatttaaaaatcatagttttacaggtcatattattggttttttctgcattcaactaatatctttgggcaatgcatttttattgccaaatttcattcaattggttaatcataatactgcttttttagcaggcttgattgttttgccagcaggagttgctggtgcaatcatgggtccaattggtggtcggttgctagataattatggtgcacgcaaacctgttttatttggtgtaagtttgatgttgcttgaaacattgttttttgcagtattacctaatcagatgaataatatttttatattgatagtttatatcatttacatggcagtaatgggaatgatattgggagatgttatgactgatactttggcagtgattgatgagagtgaaactactcaaggcaacgctattctaaatactgctcaacaatttgccggtgctgtcggaacttcaattacttcagcaatcgttgcttctagtcaaaaaggtactaagtcagctgatttaaccagaatcggaacacagcatgcatatatttttcttttatgtttagttattttaatcatggctttatttatcaaatatgttggtagaagaactgcaactaagtaaaggatcacatattcaagatattgctttttcaaaaattatctgctattattttacttacaaaaagtaagtgaaataatttaggagttgataaaatgaatattgaattaggtatctcatcatttggtgaaactacaccattagaaacaacaggaaaagcaattagtcatgatcaaagaatcagagacttattagaagaaatcattcttgcagacaaattgaatattgatgcatttgcaatcggtgaacaccatcgcaaagattttgctgtctcagcaccggaaatcattttagcagctgctgcttcgaaaactaagcaaatccatctttcaagtgctactacaaatctaccaacaattaatccaattagagtttatgaacaatatgcaacaatggatgcaatcgcatcaggaagagttgaaatcatggcaggacgtggatcatttactgaggcatttgatctattcggttatgatttagaaaattacgatgaactttttattgaaaaactagaaatgctactcaaaatgaacaaagaagaaattctcgattggccaaaaggaaagtttacacctagagttgatcataaaggaatttatccgcgcactaaaaagccaatccctatttctgtagctacaggtggaagcatagaatcgactatccgaactgcagagttaggtttgccaatcgtttatgcgataattggcggtaatcctttgcactttaaaccactaattaagttgtacagaagagttgcagaaaaagttggcaatgatttaacgaagatgccaattgctgcacactcttggggctggttaaatcatgataaagacaaagcaattaaggattacttctatcctacgaaattgttagttgatcaaattagtacggaaagaccgcaatggacagggatgacatatgaacaatatcttgaggcagttggagaaaatggagctatttttgttggcgatagcgagacagttgcaaataagatcatcaaagtcatggaagaacttgggttaactcgcttctatcttcatttgccaattgcctcaatgccgcatgaagatgtgatgaatgccattagaatttatggcgaagaagtagtgccgaaggtgaagacgtattttcaaaaaaagactgagcaagatcgtcttaaattaaagtggaagaattaaatagagagtaataatatagggttcaagagtctaaatgacttttgaaccctttttcacttttagagataaacctaaggaggatgcttattatgatcattcgcaccgtaacaatggatgatttaaatgaagtagtagaactggaatctgacgcatttaagatgactaaaaagcaaactgaacaagatatgattggtagaattgagaattatcctgatacttttttagttgcacaagaagatggaaaagtgattggtcatatttttggtcctgcttttaataaacgctatattgaagatgaattatattttgaaaatcatcctaatcaaaaagatgatcgctatcaaatggtcttgagtttagcggtcttgcctgaataccgcaaacaaggcgtagcgacaaaattaattgaagcaatagcgcaagagggcagaaagcaaaatcgtcaagctatatctttaacttgtttaccgaaattgattaaattttatgaaaaacgtggtttttataatgaaggcgagaccaatgatgatattccagatccaactggtgttactagcgtaaatatggtaaggactttgtaaaatgacgcaattaactgaagaaatgtatgcaatttttgatcgggatgaattttcttttaaaaaattgaaatcgcaatattctgaagatgaattagcgcaaataaaaacagattttaaagaaatttggcagacctggaaagaaataaacttaaatgtttatcaaaaattaccacaagataaatttgctaaagttcatgttgaaagttggaccaatggttggaacttacgcgatcattactgggcagcttatcgtttgaatgctttagccgataaaagtccatgcatcggcgtgatgctggataataagcagctgcaggtttatcttatgtttcagcattataagagtgaaaagcgcggcgataatcctgaacaatacaataaattattaactgatcttcctgattgggcaaaagggcggacaactaataattggtacttatgggataaaaacgaaatggagtttgctgatcatttatccttaaatgagtatttaacagatgctgaaaaacagacttcatttaataaggaagcaactcaatccagtttcctattaggaaaatttgcttttagaaagcaagatcaagttgcagatatggaaaacttcatcttagatggtattgggcagctattgccgttatatcgaaagttagcaaattaaaatacgttaaaattgtattttaaagtgttcatgctacataataaaagtaaatactgctgttattgtttaattaaagggataacaaatggatatttattcaattattggcatgatcattttagttttagttaccagcacagtaactagtatgattgttgccttaatttttgtattcttaggaattgccatgtttgttgtgcatttaattaagtgaaatctatatgtaaaagtaataatgcaaaataacaaattgatattttttgaataagtattgctgtgctatattgaaggtgttactgctccatcattggtgcaattgatcataatccttctgcaggtacagttctccttgataaaaaataaaactaaattcatcaacgttatctaataatgatataatgtctgtgttggattttttagaaaagagataaaaacaaaaatgaatacaatcgcatttaaccaacaattatcagataagttgaacgaagaacttaatccagaattgttctctaccccaggtaagggtgagattacagttgttgctaatgaaaagaaagacttacgtgagtaccgtattattactaaggataataaagtagtcgatgtagtcgatgcatatgatgcagatcatgatgcagcttatcaaaagatgatagatttcttgaagaattaccgttaataattgaattaaactaatgggctagaagcttgataatgagtttctagtctatttttttgccaatttttcctaatgaattagctagatatagtaataattttgccgttcaagttatttttttaaccacttagtaaaaagtaattgaatattaaaaaaatagcagtaatattaaacataaataagatatttttaatattttaatttgcttggagatgagacaaatgagtattacagggatttttaaggtcaataaagctaaattcattttaatttttctaatggttatcattggtacaaccgttgatgctgcttcgcaatatttgatgaccccggcctttaaccagctaaagaaaatgaatttatttggctttattatttttatttgtttggctattggctgtgatctagttagattagccttgattactagttcagattacttatacggaaagcaatcacaatcttatttgcaccaaattcgtgtaaaaattagtcgctacttttttaaaaatgaaattgcccaaactgctaaagtgcaaaatgaattggttgccaatcttgatcagctaacacagaattatttaaaaccaatcaaaaacggttttatgtacttgttgtctgtgcttttctcaattggaattttgttttcatttaactggcttttagtagtaatgacggtgattttaactgcaatttcattatttttgcctaaaacttttgaaaaaatgacttcatcggccacaataaaggttactaagaaaaatgaaaagttcttaaacactttagccaagtggatgagtagcctggatgaattacgaagatatgccagttttaatatatttagtgaatcagttaaccaaagcgcagacgaatataaaaaagcagctattcatcaaggagcaactattgctattgcagatatgatcacctttgtagttaatattgtgggacaaatgctcttgatggttttatgtgcttacttatatttgcaaggacaaattgtttttggtgcggtaattactactattcaatttagttcaactgtaatgaatggtgtttcagcatttgtaacggaatggaatttaattaaatccaccaaggatttgaataaggaaattactaatcttcaagctccagtaaaaatagctccagatcagcatcaagttaagaagattaacaggctagaagtaaaagatctggccttacaattcaaaaatggtgagtatttatcttacccagattttacagttaagcaaggtgaaaaaatcttgcttactggtgatagtggaactggcaagtcaactttatttaaattaattttaggtaaattaacgcccagccaaggtgagatcaatttttttgatcataatggtcaaaaattaaattttgatcttgatgaattaggctatattgctcaagataataccttgtttcctgacacaattgccaataatgtcacgatgtttaatagtgctttaaataatcaaatttcaggtgtattagatcaagtaggttttaccaaggatttggataagatgtctgctggacttaatagtcaaattgatttggataaaggaaatttatctggaggacaaaggcagaagcttgtgttagccagagctttgattcatcaatcaccttggctattgatcgatgaagggactagtgcaattgacagtgctgggacgaagcaagtattacaaaatttattgaatactccaagtactgtaattatgattgcgcacaattattctacagaattagtttcaatgtttgatcggcaaattaaattgactaatcgaggtgacgccgaatgagtttcaaaggctttattaaaactaattatttaagatttatttacattaatattttatcagttatttcaggtgtcgctgctattgggagactgtaaaatagtttgtgtaaggatgaataattccttaaatttatttcttaaaacattagaaaaaggagttcctttctcgtatgattggtttgaacaaaaaaacacatacagaaagaagaactccttcatgaatgattttaccaaagattttgctcaagctctattcaatccagacaaaataaatgatttattgcgcaaagagctacaacaggctgttaataacttgctagaagctgagttgactgcctttctaggctatgatccctatgccagaaatggctggaatactggcaattctagaaatggtgcttatttccgcaaggttgatacccagtttggaccaattgaagtgcaagtgcctcgggatcgcaacggtcaatttcatcagcacacgctgcctgactacaagcagcactcggatatcttggaaagcatgattatcaagctttactccaagggcgtgaccaccagggaaatagccgatctaattgaaaagatgtatggcagccattacagtccagctcaggtatcaaatatttccaagcagatgattccaaaggttgaggcttaccacaaacgcaagctaagcgacaagtttttctgcgtctatttggatgcgacataccttcctttgcgccgagaaacatttgagcgtgaagcagtctatattgccattggcatcaagcctaatgggcacaaggaggtcattgactactgcattgcacctagcgagaacattgaagtctggacagatatgcttcaaaacatgaaatcccgaggcttaaagcaagttgagctttttctttctgatggtgttgttggcatgaaaacagccttggccaggacttatcctaaagctcattttcaacgctgcctggttcatgtcatgcgcaatatctgcgctaaagtacgcgtcgacgatcgtgaaaagatcatgaacgaattcaaacaggtgcatcaacagacaaacaaagaagaagccacagctgtcctgcatgacttctataccaaatggggcaaggtttacagccatgttatcagaagcttgaaagacatagaaccagatctgctggtcttttataactatcccaagcagatcagagcttcaatttattcgactaacatgattgaatcatttaacaatgtgatcaagcgcaaagctaagcctaaggcagagtttccaactgaacagtcgcttgatgcttttattggcattcaggcaatgagctacaatgaccgttatttcaatcgaattcataaaggctttggtcaggttcaggacaccttagaatcctactttgattaaataaataattaaaaaatcaatttgcgagaaagaactatttacacaaaagatttgacagtttcgctattggtgcaggctacattcaaatgtactggctgacttatatcaaagatcgtgcttgggtgaagattttacttgcgacggctttaatggggattttatatttagctgctcaagggatgatctattatatccaatttgtaattcgagtgcaggaagaagaatataataaaaaggtgcgcgctcgtttggctacacattactttagagatggtcaaaatcatcaagtaccggccgtgcaaaatcggatgactaatgatttagaaatgattagaaaaaattattttgattggtatccaattgtgccgttctatggctcaatgtttgttgcggcattggtggctctacttacaattaattggtcaatctttttgactagtgtagtgattgatattgtttcttactttgtacctaaattagtacaaaagaaaatggaacaagcaactaataatgtttctgagcaaaataagcattatctagatgttttagctaaatggttctctggcttagaagaattaagaagatattttgctggtgctaagttatttcaggtaggtgaaaaaacttcaagtaaagtagaacaggctcatgttaaacaaacggctgctcaacagcaattaattattttgaatgggatctgtaacatggtaggacaaataatcctgttgtctttgacggcttttttgatcactaagaatttagtgatttttggtgcaattatgtctgtccaaaactttgcagctaatatttcgatcggcttacaacaaacaattcaggcattaagttttatgaaatcgtcacaggatttaatgaaacaagttgatggtgatgctactgtgattgaaaaagttaaagctggccaagaagagacaccagtagcattttcaacaaaagatttggctttgcagtatcctaatggtgaaaagcttacttttcctgatattgcagttaaacctggcgagaaaatcttattaacaggagattcaggcgcaggtaagtctactttatttaaattgattttgggtgaacttaaacctagcacaggcaaaattgaatttcaaaatagtcaaggtttgacaattaagcctaatatgtcaagaataggctatattccacaagagccgaacctatttccgggtacaattaaagaaaacattacaatgttcaacaagcaacttaataatcaagtagctcaagtgcttgatgaagttaattttgcggccgatattaaaaagtttaaagcaggtgtcgatgaaaaaattgacttggataatttgaatatttccggaggacaacgacaaaagatcgtattggcaagatcgaagatccatgatagtgacattattttgattgatgaaggaactagtgcaattgatcagacagcgactatggatattttacaaaaattattaaaaagcaagaccacaattgtctttattgctcacaattttaataaacagatgcaggaaatgtttgatcgcgaaattcatttaataaaagaataaaaaatcaattagagaaaagactcccaaatattaatatttttaatttgaaccttgacaaaatgttgatttaaccagtaaattaattgcgggttattaattaggatagattaattattggagttgtgaaaattgaataaaaaatctaaagctcctcaactcaaacgaacaatgacagcaggccaaatggagatgatctctcttggcggtgctatcggtgttggtttgtttatggggtcaacctcgactattaaatggaccggtccgtcagtattattagcctacatgtttgtggggttgattttatatattgtaatgcgggcattaggtgagatgctttatatcaatccagggacaggttcatttgctgattatgcaacagaatatgtgcatcccttagccggctatttagcgatgtgggccaatgtctttgaatatattgtagtaggaatgtccgaagtagtcgcggcaactgaatatctgaagtattggtggccgaatatttcggcgctgtggtcggggatcatcattattgcctttttactactagccaatttagctagtgctaaggcttatgcatcactagaattttggtttgccatgatcaaagtaataacgattattttaatgattattttaggctttatcgttattttctttggtgtaggtaatggcggccacccaactggctttagcaatttatggtctcacggtggtttctttactggtggaataaaaggatttttcttttcaatgtcaatcattgttggttcatatgaaggaatcgagttattaggtatttctgctggagaagtagccaatccacaagaggcaatcgttaaaagtgttaagtcagttttgtttagaattctaattttctatgtcggagcaatttttgtcattgtaacgatttatccttgggataaattagacagcctaggttcaccatttgtaacgactttcgctaaagtagggattactgcggctgcttcaataattaacttcgttgttttaacggctgctctttctggtgctaactcagggatttattcttccagcagaatgttgtttaagctatctcatgaccacgaagcaccgggaatttttaagcatatttctaagcgaattgtacctgatcgtgcaattatggggatttctgctggtatttttattggttttgtcttgaacgtaattgcttcacaatttaatcattcagctagtgatttatttgtaattgtcttcagttcatctgttttaccaggaatgattccttggtttgtgattttattagctgaattaagatttagacggcataacaaagaagcgatacaagatcatccatttaaattgccgttatatccattttcaaattactttgcctttgcaatgttgataatgattgtaattttcatgtttctcaatcctgatacgagaatttcagttatcgcaggggcattagtcttgattgtggcaacaatcgtctacttagttagacacaaaaatgaatttaagaaaagtaattaaggtgattattcacctttttatttttatctaaaaacactaaatctatggtttttcattatccaacatataagatctatggtatgttagaagaaatgttttttgaaaggtgaagataatggcaattcttgaacaaccatatttggatttgttagaaaaaattatgactgaaggacatgacaaggatgatcgaactggtactggaactagatcatattttggtgcccaaatgcgttttgatttgacacagggctttccacttttaacgactaaaaaggtgccatttggtttgattaaaagtgaattgttgtggttcttgcgtggcgataccaatattcgctttttgctagagcataacaatcatatttgggatgaatgggccttcaaaaattgggttcaaagtcctgaatatcagggtcctgacatgactaattttggtttgcgtagtcaaagtgatccagaatttaatcaagtttatcaagcagaaatgaagaaatttgatcagcgcattcttgatgatcctgcttttgcccagaaatatggcaacttaggtgatgtctatggggcacaatggcgtcattgggaaaagcggacaggcggttttatcgatcaaattgctgacgtgattaagcaaattaaggaaacgccagattctcgtagaatgattgtcacggcctggaatccggaagatgtgccaactagtgctttgccaccatgccatgtcatgttccaattttatgtagtcgatggcaaaattagcgtgcagctttatcaaagaagtggtgatatgtttttaggcgtgccatttaatattgcttcatattcgctgctcttgaacatgattgcgcgtgaaaccggcttaaaagtgggtgaatttgtacatactttaggggatgcacatatttatcgcaaccactttagccaagtaaaggaattgctgagtcggacgccatatgattcacctgaattgtggcttaatcctgaaaaaaagcacattgaagactttgaaatgaaagatatcaaagtgctgaattatcagcaccatggcacgatcaaggcaccggttgcagtttaggaggtctcaatgttaagttttgtttgggctgaagatcagcagcatggtattggcatcgatggccatttgccttggcatctgccggctgacttgaagcattttaaggaaaagaccataggtcatccgatcatcatggggcgaaaaacctttgcgagtttgcctcacttgttaccagagagaaaacatattgttttaactcatcgtcaagaattaaagcaaaaatatgcgggtaatgagcaagtgaagattgtgtccacattagctgaattaaatgaatatcttcgtcaacatcagactgaagaaatctgtgcaattggtggagtttcaatctttagggcgttacttgatcaagttgatcttttagaaaaaacagagatcaaagctaattttaaaactgatacagtgatgccagcgattaactatgatgattttgaattagttagtcgcgaagagcatcatcatgatgaaaagaacaagtatgactatacttttttaacttatcatagaaaaaataaataattgttaaaaagtctcgcagagttgcgtggcttttttatttttcgctataatggatgaaagtattttcagtataggacagaaaattatgacagataaacaaataacgggattaactcaagctgaagttgatccaagaattcaaaatggacaggttaatcaagccattgatgaccagtccaaaacagctactcaaataattcgagaaaatgtctttacttattttaacttgatttttgctattttggctgtgctattggtgtttgttggtgcctggaacgatctgacttttttaccagtgattgttttaaacacgattatcggtattgtgcaggagcttcgtgctaaaaaagttttaagcaagttaaacgtgatgaatgcgacggaaattatcgcggtacgtgatgggcaagaagaaaaaattcccatcgaaaaattggttcaagatgatgtcgttcttttacaaactggtgaccagattccagctgatgcgcgggtaatctcaggtgagctgcgggttaatgaagccttgttgacaggtgaatctgatgaaatcactaagactaaagacgcagaattaatgtcaggttcttttgtagtttccggtaaggcttatgccgtcttagaaaaagtgggtaaagactcatatatttctaaattaacgatcgaagcaaaggcaatgggcagtgttgaacaatctgaaatggtgcgttcaatcaatcgtctggttaaatgggtcggcatcatcattattccggtgggaattgccctatttagtcagagtttctttttgaataatattggactcaagcgtagtatcacttccatggaagctgctttaattgggatgattccagaagggctatatttattgactacgattgccttagctctagctgctatgcgattagcgcgacaagaagtaatgctgcacgatatgaagagtgttgaaactttagcccgagtaaatgtcctttgtgtagataaaacgggaacaattaccgaaccgaagatggccgtagaaaaagctgttagtagcaagaattttactggtgatttaagtagcatcattgcggattttgctaaaaacatgccagctgataatgcgacgatgaaggcgattcaagcctattttaaagatggaaccaaaacggcggatagcattttgccttttacctcagtcaataaatattctggtgtaatttttggcaatcagacaactttaattggtgcgcctgaaatggttttgcgtgatcaatttgcgcaatatcaaactgaatttgaaaaatatgctgcagaaggctaccgggtgttgattgcggctaattatcctggcgtattaactgaagataattccgccttaaaggaaaatgtacaagttctcggttatattttattgtcgaatccaattcgtaaagaagccaagtcaacttttcaatattttaaccagcaaggtgttgatatcaaggttatttctggggataatccggtaaccgttgctcgagtagctaagcaagctggaattaatggggcagataagtatatcgatgcgcaaaccattaaagatggtgaatatgagcaggccgtgcaaaactataatgtctttggccgggttaagcctgatcaaaagcgaaagtttgtcgttgctttgcaaaatcaaggtaataccgtagccatgactggtgacggagttaacgatattttagcgatgaaaaaggcggattgctcaatcgctatggcttctggtaatagtgctgcagtgcaagcttcacaagtggttttgctcgattctaattttgctaaaatgccgttagtggtgaaccaaggcaggcaagtagttaataacattcaacgttcagccagcttgttcttggtgaaaaatattttttcattcttgatggccatcttctctttgattatgacaatcaattatccgctgcagccagcccagatcacattgatctctgcatttacaattggcttgccgtcgtttttattggccttagaaagcaaccacaagcgaattcgtggaaagtttatgccaaatgttttagctcgggcaattccagggggcttaacagattggctggcagttgcaattttagtcattgcaggggcctctatctcacttgatcatggtcaggtaggcacgacagcgactatgttgctagtcttagttggttttatggtgatgtatcatatttcggcaccaataaacaaatttagacttgctgttatgggcttatcagttatctgtattattggctcaactatcttttttccaagattgttctcattgacaatgcttaataacaaatcattatttattttggcggtcttattctgtgcggcagtgactatctttagatggttatctaaaattttggatggaatcgccgaagtgttggttgtctttgatcaaaaaggaaagaacatgacttttgtggaattcaaggaagcatatgatcgtggcaaaaataatgtgaaataagaagataatgaaaaagccagagttttgctctgacttttttactaccttaatgattttcgatatccagcagcttgtgcggcagcttcactgttgaagtaaactgcattagctgatgacatatgataattttgcccgttcattacatggtagatcttactgcgacgattgccaacgactcggtgttctgcagtggatacagtacctttgatatggtgaatggttcgtttcttggttactcgagaagtggatcgttttctagattttacatgttcagcaatagtactagacccatgtttaaccttagaagtaccggtcttgtaattaagcaacataccaggttgctcattaaaaatgtagacattaaagcgaagcccgtttttgctagttgcttcggcttccatttcaacgccgttagctaataggtcattccctttaaatattggagtaacccgatagcggacatagtttttgctcgaactacgtaaatattcagcaacctcattttcatatttaagcatatccggatcatttaattcacgcgtaccggtaatcaaattgcgtggattgttgttttgaccagtcaactgatagccgattagatggcaccgattatacaaccaaccactagcgattcgtttattatgccagccggtcggattccaagttaaagccgcacgctgactatgtggcattaatcttttatttagtaaagcattagcagcatgagctcggttcaaataatctaattggctatatttttgccatggaccttttttcttgctcaatgtactcttagaaaactgcggctgatcatgatcaacggtcacaatttgtttgttgtggtatttcaaattgactaatgctttatctgaaacagcatagacggtttgattgttgcatgggacattagtattagcaaaagaaatgaatccaattgctgcagctaatgagagagcaaaacttcgaaagcgatttttcttcattttttctccttagcaaaaataaattatttaactatatcctaattatacaatgaaatcgcttttatctaataaaaattaaaaaagatgttgactagattaaaagaagatgataacttatttataacaaatcaagaaaacaacatcttgaaggactgagtaactagaacttctattgataaagagagccagcgtggtggtgaaagttggcaaataggagctagtgaatatgggtttggaacgatgaccggtggtgatatttagctatcggcggggctgcatccgttaacagtgcaggctattttttgatagccagtgaggttgattacgtaagtgatcagcgaattaaaggtggtaacgcgagcactcgtcctttggggatgggtgcttttttatttttatcaaagtaggagtgtattttatgagaaaacggagaagaagaaataccattatttggacgatcattgggatactgatcgtgattgcaggttggtttagttttggtccaggaattcccagtcaaaatcagacaaaaactgttacagtcggaatcgttggggaaagtaaagccgaagccgcaatttggaagtcaattgctaaaacggctaaggaaaaatatggtattaccttaaaaactaagaactttacggattacaaccaacctaacaaggccttgaagtcgggcgatattgacatgaatgcttttcaacactatgccttcttaaaggattggaataaggcaaatcacggtggcgttgtcgccattggtagaacctacatcgcaccgatcagactttattcacgcaagtatcataaattgagtgacttacctgatggtgccacgattgcagtgcctaacgatgctactaacgaatcaagagcactgtttgttttgaaaaatgccggcttaattaagttgaagaagggtaagaccttagttactgtagctgatatcaccagcaatccaaataactacaagattaaggaaatcggtgctgaacaaactggtcgagtattgaattcagttgacgcttctgtagtaaataatgattatgctggtcctgctggcttgactgataagcaaacgatttacattgaaccaattaacaaagattcaaaacaatggattaacattctttgtgtcaaacaaggcaaacaaaaggacaagctttaccaagatgtcgtcaaggcttaccaaactgcagaaactaagaagctaactaaggaatactatggcaatacgcaaattgcagcctgggacgttaagttgaagtaaggaggatcaaaaatgagtattgttgaattgaaaaatgtagaagtggccttccctcagaagaagggcgaacgagttaaagcagtgaataatgtttctctttccattgaaaaaggcgacatttatggaattgtaggcttctctggtgccggcaagtcaactttagttagaacggtcaatcttttacaaaaaccaactgccggtagtattaccgttgatggcactgaatttcttaaagatggcaagcaggtgatttctaataaagaattgcaattaaagcgcagaaacatcggaatgatcttccagggttttaacctattaaatgaaacgactgtattagaaaatgtagcctttgccttaaaacatgaaaagttgagtgatgaggaattagaaaaacggtcattggaattgcttgatctggttgacttaaaagataaggctgacttttatccagctgaattatctggtgggcaacaacaaagagtagcgattgctagagctttggctaataatccagatattttgatctctgatgaagcaaccagtgccttggacccacaaaatacgcaacaaatcttggacctgcttaagcgtttgaacaaaaagttccacttaacggtcatcttaatcacgcacgaaatggatgctgttaagaagattgccactaaggtcgccgtcatggaacacggcaatgtgattgaagacggcagtttgcgagatgtcttcttacatcctaagcaggatttaaccaagaagtttgttggtggatcacttgaagcgatttctactttgaattcattggcgcttgataagcttggcaaaaatgaagcaatttatcaattagtttacagcgtagctaatgtgactaaatcaatcattattgaattgtataagcaaattggcgtagaagtttcaatgctttatgggaatgttgaacttttgaatgaagagccaattggtactttggtggtattggtgaaaggcgatccagctaagcaaaagcaaacacaagaatttttggctaagcaaaatgtgacatttacacgtttagatgaaaaggggaatgtatatcatgattagtttcttaagtaaatatttacccaatgttgttcaacttggctggggcggagacgctggctggggcactagtatttttcagaccttatttatgactttttggtcagctatctttggtggcattcttggtattatctttggcgtgattttagttttaactaaggatggcgggattcggcccaataaattctggtacaatttctcagataagctagtttcaatcttcagagcgattccgttcattatcctgcttgcctttgttgcaccagttactcaaaaaattgtaggtacacagatcggaatgaaggcagccttagtaccattaactttaggcgtatttccattttatgctcgtcaggtgcaagttgctttagaaagtgttgacccaggtaaggttgaagccgcagaaagtttgggctcaactgcgcgtgatattgtctttgatgtttatttaagagaatctcgctcagaactgattcgtgtttcgacggtgacgattatttctttgattggtttgactgcaatggctggtgctgtaggtgccggtggtttaggtaataccgctatttcatacggttataaccgattcaataatgatgttactttagtagctactgtattagtaattattttgatttttatcgttcaaatcattggtgacttctttgctaaaagaatgaatcaccagtctagataaaactatgatccaggaaaaatcctgggtctttttttggaatgaaattgaaaaagaaagcctttacaggtattataaatggtgattgataattaacgcaaaccttatagagcttaataaggaggaatataatatgagcgaagaagaataccgtgttgaaagtgacactattggtccagttaagatccctaaaaatgctttatggggccctcaaactgaaagaagccgcaataacttcccaagtggtgaattgatgccattgcaaattattcgagcatttttatacttaaagaaggcagctgcagaaagtaacgttgaagttggcgatgaaccaaaagaaaaaggcgaagcaattgaagatgcaattgatcatttgctagctttaagcgatactgacttgcgtaaggacttcccacttcatgttttgcaaaccggttcaggtactcaaagcaacatgaacgttaacgaagttgtagctaacttggctaataaattgcacccaggtttagatattttgcctaatgatgatgttaaccgtggtcaatcatctaatgatacttatccaactgcaatgaatattgttgccgttgaagcattggacaagttggaaccagcaattcaacacttaattgatgaattagttgttaaagaaaagaaatattggaagactgttaaagttggtcgaacccacttacaagacgcaacgcctttgacttttggtcaagaattatctggctatatttctgctcttaaacatgacttatcatatattcgtgaattgaagccaactctctacgaattagctattggtgggactgctgtagggactggcttgaatgcagcaccgggaatgaccgaaaaaattgctggtaaattatcagaagtctatggtcataaatttgaagttaaaactaataaattctggggcttagctcaccattcaggtcttgatgtagttcatggtgcccttaaaacattggctgctgatatgtttaagattgcgcaagatattcgtttacttgcttcaggtccgagagcgggctaccatgaattaaatattccagcaaatgagccaggttcaagtattatgccaggtaaagttaacccaactcaggcagaggctgtaacaatggctgctgctaaagtatttggtaatgacaccaccattacctttgcttctagtcaaggtaattttgaaatgaacgtcttcaagacagtcatcattgcatcattcttagatagttgtgatattttaactggtacaattactggttttgctgataaaatgattcatggcttaacggttaatgaagaaagaatggatgaattacttgagaattcattaatgaccgttactgccttgtcgccacatattggctatcatgctgctgctaagattgcgcaaactgctgataaagaaggcactactttaagagaagctgctttgaagagtggtaaagttactgaagaacaatatgatgaatggatggactatatgcaaatgactaatgttgataagtctactccagaagaatagggaaagtaagaaatgccaaatacaaaagaattaaagaataaatatgatgctatcgttgttggctcaggcggagcaggtctgactgctgcacttcaagctcatgaactaggtctaaatgttgttgtgcttgaaaaaaatgagaaaactggtggtaacactagtcgtgcttcaagtggaatgaacgcttctgaatctttggttcagcttgacgaagggatcattgataataaccgtgacttctatgaagaaactttaaaaggtggaggtttattaaatgaccgtgccatgttgaagtactttgttaaccactctgctttagctatttcatggttgatgaaatatggtattcgtttaactgatttgaccattacaggagggatgagtaagaaacgtgctcaccgtcctgcttcaatggaaccagttggattttatctaacttcacgaatgacaacacaggtgaaaaaagcgggtattgacatctttactggtgctaaagttaccaagttgttgcaagatgctaagaagcgcgttaatggtgttgaagttgagacaccagatggcattaaaacagttaaagctaaggtggttcttttagctactggtggctttggtgcttccaaggatatcattaagaagtatcgtccagacttagttgactataagactactaatcagccaggggctacaggcgatggactgaagcttgctgaagcacttgatgctcaactaatgcaaatgaacttcattcaggttcacccaactgcagatactgataatccgcatgtttatttaattggtgaaggtctgcgcggtgaaggtgctatcttagttaacaagaatggtcaacgttttgttaatgaattaagtacacgaaagattgtttctagtgcaattactaatttgcatgaagatggggcatacttgatttttgactcaggtgtacgggctcattttgctgcagttgagttttatgaccagattggtttagtagaacatggtactgatttggctgatttagctaaaaaaattggcgtaaatggtgccaacttagaaaagaccattgccgcttggaataagtccgttgcaactggtaaggataaagaatttggcagaacgactgggatggatcgtgaactggatcgtggtccatactttgcaattcatgttcatccagcaattcactatactatgggtggtattcatattaatactgaaactcaagtacttgatactaatggtaatgtaattgatggattatttgcagctggtgaagtatctggcggacttcatggaaataatcgaattggtggtaactcaattgccgaaacagttatttttggtcgtcaagcaggtattcagatggctaaatatgttcgtgaaagtaaataatataagaaagattatgtaaagagagcggttggttaactgctctttttcgatagaaataataacactggcgagattttgatgggatattataatttataattatggaataaatcgtgtctaatgaaagcgcttagtgtataattaatcatgtagataaaaaacagtttataaacatttgaaaggactaatttaacttatgagtagaaaagtatttcttgttggtgatggtgctgttggttcaacttttgcaaatgacttattgcaaaatacaattgttgatgaattagcaatttttgatgtagctaaggatcgtcctgttggtgattcaatggaccttgaagatattacgccatttatgggtcaaaccaatattcatcctgcagccgattatagtgatgctaaagatgctgacgtttgtgtgatcactgctggtgttcctcgtaagccaggtgaaactagacttgacttggttaacaagaacgttaagattttggaaagtattgttaagccagtagttgaatcaggatttaatggtgtctttgttgtttccgcaaacccagttgacattttgacgactttgacccaaaagttgtctggtttccctaagaaccgtgtaattggtactggtacttcacttgattcaatgcgtcttcgtgttgaactttcaaagcgtttgaatgtcccagttgctaaggttaactcaatggttcttggtgaacacggtgatactagttttgaaaactttgatgaatcaacagttgctggtaaggcactccgtgattactcagaaatcaacgatgatgttctagcagaaattgagaccgatgtgcgtaagaaaggtggcaagatcattgccaacaaaggtgctacattctacggtgttgcaatgatgcttactcaaattgtctcagctattttggacaatcgtgcaatttgtttgccactttcagctccgattaatggtgaatacggtattaagcatgatctttacttaggtaccccaaccgttattaacggtgaagggatcgaaaaggtaattgaaactaagctttccgatactgagcatgctaagatgattaactcagcagacaagatgcaagaagttttgtcaggtataaacctttaattgatcattaattttattaaaagccctagttgtcaaaaactaggactttttcttaatgacaaaaaagctagaaaatagtattatataagaaaagattaataaaaaattaaaagataagaattaacgaggtatatcatgacagttatttcacaacaagaaattgaaggcttttctgaaagctttaattctaatcctgagaataaagtagcttctcgtgctgctcgtcgtagtggtttgcttgaagcttcatttaatgaccgcgtatcagaacgacttaaccatgtcttttcaactgaacttgatattggcggtgtaactgatcagaagcattctggtcgttgctgggaattcactactttgaatgttttgcgccactactttggcaaggaaaacaaggtcaaggattttacgttctcacaagcttataatttcttctgggacaagattgaacgtgctaacgctttttacaatgcaattattcgtttggcagataaacctttaactgatcgtcatgttcaagcatggcttgagtttgccggtgaagatggtggcctttggaccatggccattaatttagttaaaaagtatggcgtggtaccttcatatgcaatgccagaaagctttaatactaataatactactgctttagccgaaaacttagctcgtaaggagagaaaagacgctcttgttttgcgtaaattagttaatgaaggcaagagggatgaagcagaaaagaccaagaaggaattcttgaacgaaatttatcgcatggtatcagttgccttgggtgaaccaccaaagaaatttgatttggaataccgtgatgatgataagaagtaccatttggagcgtgatttgactccacaagcatttgttcaaaaatactttaaggacttcaacttcgatgattatgttgctttgtccaacattcctaaccatgaatataacaaggtttaccacttgccactttatgacaatgtggctggcggcgatcaagtcaaatacttgaatgtgccaattgaatacttagctcaagctgcagtagctcaacttaagtcaggtgaagcagttagctttggtaacgatgtcttgaagcaaatggaaagaaaaactggctttttggatactgaattgtacaagactgaccaattatttgacgttgatacgcaaatgagcaaggctgatcgtttgaatactggtgagggctttgctactcacgatatgactttagtcggtgttgatgaagacaacggtcatatccgtaagtggaaggttgaaaactcatggggcgacaagtttggtcacaagggcttctacgaaatgagtcaagcttggtttgaacaatatgtttacgatgtgattgtgaagaaggaatttttgccaaaggaattgcaagagttagttgatcaaccggctgttgacgtaatgccttgggaaaactttggtgaataagatcaaaataacaaagatcaagtaaagtgtctgggaaaaaactaacccttagatactgaaagacgatcaatccaactcttaatttgagttgcttgaccgtctttttctgtctatttttatttttgaacaaagaaaattggtcttttgaccatcttctgttccaatatttgcttaaattcatcatcatgaaggctattcctatatctgtttcaaccttctttttgcctctgaaatgagttcggcgcatgccaaagacgttcttcaaatgtccaaaaatcggctccacatcatatttcctcatgctgtagatgtgtctgccttcaggactttggagaactgctttggctttttcttttaggtattgccagttaggattatagcgaacctgacgttggcgtccgctcttagtcttggctaagcgttctaattctggcgttagttgaaattcatctgcttcatagaccttaaaatcacgaacctgaccagtcgatcgatctttacgttgactataatatttgaagttgaatctgacgccattttgatcaaggtaataatcatctttttcatcatagaaccagttagccagcttagtcggatcgttgcgatgctttctggtcttttccttttcgtacatggtataaggaatatagtacttcttgtctgaatactcttcttctaacattgaataattatattcgctgccataaccagcatcagcgacaatcttgtcaaacttgtctagtgtcgtcatctgctttaaaaatggttcgaaagttctgaaatcagttggattagggtataaagcaaagtcaaccacatattgatcagtggtggcagcttgaatattgtagcctggcttgagctggccgttcttcatgtgatcttccttcatatgcatgaaagtcgcgtcatgatctgtcttagaatagctgttacgccctgcaaagatttctttcgcctcttcatatttcttcattcgaggaacatagtcttttcttagtttatgaagcagctttttaagaccgcgtcttcttgcttttctaggcgaaccgccagggattgctttgggttcttgctcaatttcttcggtcagcttttcaatctcggcttccgtttcttgtgctagctctgccaaaccttgactggtctggactttctcttttgccattgctttgacgacttctttggcaatcaattcatcataaagctcaaccgcttgacctttgagcttgtcatgaaatttttcaactgccttgcgccaaacaaaagtatagcgattggcgtcagcttcgattttagtgccatcaataaagatcgctccttcattgataaggccctcggcttctaacaaattggtaaagtagaggaagcttttcttaaccagctcattggcatgcttgctggatctaaagttattgatagtatggtaagaaatctgttggtgttcagccaaagccatcatcggcacgttttcttccagcattaattcgatttttctgcctgaaaatactcttctggaataagcaaaaagcaagattttaagcatcatcgctggatgataagctggacgaccggttttagcagtattacccaataagacatcttctggaattgaatcgacaaaccagctaatggtattagccaaatgattatgaggaatagcgaagtctaagttgagtgttaaagctgtttgacctatggtataattttgatacattaagattgccttctttctttttgttttgtggtgattcaataatatcaaggaaggcacttaaagtatagaaaaagaacgatgaaatccattaggaaatcatcgttcttttttcctgtctgagaattagttttttcccagacactttttttgcataattatttgagtttaaataattcaaaaaataagtaaaaaatcaaaataattcaaaatttgtaaccgcttaatctgttgataagtgtataatactaattgtgagttgtgatgagttttagtttttataaaaaggcttgtttaacaataacaagatagattagggagcataaagaggggagagctactctatgcctgtaggaaaaagaatttatttaaagaggcaaatgcctgatccaaaagttgtagctggttttaaaaagatcccagcttctaataccgcggattgcatggaacgaaattgtgctatgaatcctagaattaagttaatgtcgaatcctgatgaggaaatggttggtccagcatttacggttcacaccagggcgggtgacaacttagcaatttatgcggctttaaagtattgccagccaggcgatgtgattgtcatcgacgacgagggtgataacactagatctttgattggtgaggtaatgatgtcttacttacgcgatcaaaagaaaattgcaggtattgtaattggtggcccaattcgtgatattgataatttaagaaattggaaactgccgatttatgcaaccagtactaccccaggtggaccatataaagaaggacctggtgaaataaatgtacctgttgcttgtgggaatgttagtgttaacccaggtgatgtgattttaggggatgctgatggagtaatttgtattccacgtaaagatgctcctgagattttgcctaaggcacaagcttttcatgagcaggatgaggctaaagcaattgcctttagcaaaggagaagttgatttaagttgggtagataaaagcttagcagataaaggctttgacatcattgatgatgtgtatcgtccatagagaataggggattcttatgaaaactttagaaaaagtgaattataaaggctttatttggcctttgatcgttggaattgtattgtggtgtattactccatggcgcccaagtggcctttcggttcaggcatggcaaatgtttgccgttttcgttgccacaattgtagggtgtattacaaaacctttgccaattggtggtacaaccttagctggcttggtagtaactgttttagttggcttagcaccaatgaaggacgttacaaatgcaaaaggtatggtagttaatcaaggcgtgcttagttcatttggtaactctgctgcatggttaatcgctatggccttcattatggctcatggtattagtaaaacaggtctaggtaaccgtattgcctatattatgattcaaaaatttggtaagaagtcattgggtattggttatgcgattactggattggaattaattctcggtgccttaattccatcgaactcagctcgtacgggtggggtcgtttggccagttgttgaatctgtttcaaaagaaggctacgattctaagccagatgatgcttctcgtaaaaagattggtgcctacattgactttactgcctttcatgccaatattttatcaacggctttgtttattaccggtgctgctcctaacatggtggctcaacaattagccgcacaaaagggctatcaaatgtcttgggcaggttggtttttcactgcaatcgtacctgttgctgtattggcagtaatcattccatttgttatttacaagatgtacccacctgagattaaagaaactccagatgctaagaaatgggctgatgaaaaattagcaaaaatgggaccaatgtcaactccagaaaaaattatgatgtcagtcttcattctttcaattgttttatgggttttgtctagtttctttaagatcccacaattagatgcgacttttgttgccttcctggctgtaactattttgatgattaccggtgtgttaacaatgcaggatgctctgaaagaaactggtgcttggaatatcttgatttggctttctatcctgatgttcatggctggtaagctgatttcatacggatttattgattggttctccaaattagttcaaaatagtcttcatggtgttagctggggctttgtattggcaattctagttttgcttttgttctacacccactacttctttgcaagtggaactgcacatatgactgctctttatttgccattcttgtctgttgcggttgcaactggtgctcctttaggcctttccgcaatgcttttagcctttactggtgcaatcaacgcatcaaccactcactatgctaatggtcctgccacaattttggctactactggctatgttaaacaaggtgaatggtggaagatgaattttgtccttggattaatctatatgattatttttggaactgtcggagttctttggatgaagattattggtttatggtaaaaaaaagcaatctggaatcacccaatgtcattaagttaagacattgacaattaagggtgcttttttagagatcgaatcatttggattcgatctctttttttgtataaaataaaggcgaaaagaccagccttttcgcctatcttatatattatatattttaaaccttcaaaattattgccagaaagatggtgttaattatgaaagcccttcataagaatattctagaacgtcttgatcaaattatcaataatactggggatcatattcacgattttattaataatcctcatgcttttaccaggaaacgcactttagatgcagcgacagtccttaaaactacaattaacatgcaaggtcagaatttaaacagtgaactctttagagcttttggcgaagatgcaactaaaaagaacgataaagtagttagtacttctgcctatgttcaacgcaaaagccagctttctcctgcttgttttaaacatattctgactgtttttaatcaaaatctatttaatattcaactttttgatcatcactaccgtttgtttgccattgatggctctgactttaatcaaatctggaatccgaaatcgaataacattgtacaagcttcttctcataaaaagaaaccctattgtcaaattcacgttaatgccttatatgatctattgaataatacctaccaggattgtatttttcagcctaaatcagaaatggatgaacgcaaagcggctgttcaaatgcttaaagctttgaattgtggtccatatattgtaacaatggatcgtggctacactagtttcaatatgattgaaaactgcaatcgcctgcctaactgtcattacataatacgaactaaggctggacaaggcggagttaaagaaataacgacattgcctgatcaagaatgtgatcgtgagatttcctgcctggtaactacttctaactattactacatcacgcataaagccagtgagaatattcaccatgtccagcatcattatcgccaatatattaagtatcgctctaaaaatacccaggatctaagctgggattttggcgagttatgcacaataaaatttcgagcctgcaaatttagaattaatgatgccaaatcaggcaaagaagaatgggaagttgtgctaaccaatcttgatcgaaaaaattatccgctaaaaagaattaaagagctttatcatctgcgttggggtattgagacctccttcaagaaattgaagtattctttaggcagtgtacagttccattccaaacaagataaatttattgaaatggaaatttatgcccatatgattatgtttaatgcaatcagtcaaattgatgcacaggcctatattccgcaaaagcattgcaagtatcaatatgccatcaatttcaagcaatcatgcttgattattcagagcatgtatttggcttcttctttaacgcaagattttgaacggatccttattcagatcagctattataccattccaattagaccaggccgcaaggacaagagaaatattaagcccaaatcagctgtatattatttatatcgcgtagcttaaaaaagcagaatctgtgctatgccttatttgttgtacgaaaaaagcaccaatttaaccaattaaatgttaaatcagtgctttaaaagtctaatattaattgtcaatgtcttaacttaatgacattgggaatcaccaggttgctttttttgcgtcataatagaattgagtaatcaaaatgaaagaagattaaagatgaaatttaaaactaatgacgatgtaattttgcattataccgatacgggggatgaagataagcctgctttgattgggatcccaggtatagggggatcttgtcaaatgtggcaagatttaattgccttatttaaaaatgattatcgttttattatgcttgatccacgcaatcaaggacagtccgaacgaacctatcgtggacagcggattagtcgtcatgcagttgacttagaggagctattagttaagctcaatttgcatgatgtagtagctattggaaattctatgggggccgccaatatttgggcatatttgtcaatttatggcaaaggtagactaaaggcaatggttgatttagaccagtcaccaaagatgattgcggataagagctggaagtatggctttaaagacctaacttgggataattatcctgacatgcttaaatttgattttggcaaggctttttaccatcacattgatgaaaaaatgtttttggctgctaaaaaggaatatcaagaattcccatatgatccagccgaaaactataactgtttagttgaacatgcggagcaagattggcgtgacatgattttggatacgccggttcccatgctggtaattgctgggggaaaatcgccattttttaatccagaatttacccaagcgataaaaatgctgaatcaagatgttcaaacggcgattgtaccggaatgtgggcatttgcctcaggctgagcaaccagaaaaaacgcatgagattattgctgaatttttgaaaaatttaaaaaattaatagataaattgaaataatcaaactaagagagtaaactatatttgtgaaaacgattaccgaaatagcaaggtggcatatttatggataaagtcgttgatttgtttttaaacgacgctacaactaggcaaaaatgggaaaacttgttggaatcattggggttaaatgattttagtgaacgcgaagttaacgtgattgatcatactattgggctagaagatgaggaaggcaatttagttggtactggtagtgtggctggtaatgtcttaaagtatatcggagtcaagaatgatgccgatacgcagggggctcgctttaataaagtggttacagccttaacgcaatatttgactaatgatggaattttccattcctttgtctttactaaagcaaagtatgcaactagctttgagcacttgcacttcaatttgttagccaagacggatcaggcagcctttttagaaaatggaacgcctgatgtgaaggaatttgtggctgaagtgcccgaaatagcagatcaagagcataagaaggtcgctgcaatagtcatgaatgcaaatccgtttaccttgggtcatcagcatttgattaagatggctagtgaagaaaacgatttggtttatgtctttgttgtggctaatgatgtttctttgtttagctttgatgagcgcttcaaattggtgcaagaaggtactaaggagtttagtaatgtgaaagtaatctctggcggagactacatggtttcaccagctacttttccagcatacttcttaaaatcacctgacgatttaattgctgtacaaacggtgatagacgcagctgtctttaagaatcaaattgcaccaggactgaacattacccgtcgttatattggtaaagaaccaatttcaagaacgactcacttttataatgttagcctagcgcatgagcttggtcctgagattgaagtaatcgtaattgatcgcttggaaaaagacggtcaaattgttactgccactaaagttagacagctgatcaaggatggcaatttaaaagagatcaataaattcgtgccggaaacgacttatgaatttattaagcaaaacatgcagaaattgcagtctaaaattgagaaaggaatgaatattaatggaaattaaaaccacagcagttgcgggaacacttgagagttcagatatccaaatcatgatttcaaagggttctaacggcattgagattgaccttgaatcagaagtaaaaaaggcctatggagatcagattgaaaaggtgattactgacaccttaaaagcttatggcttagaaaatgccaaggttaaagcaaccgataagggagcactggattgtgtaattaaggctcgtactttagcagctgcacaacgtgcaaccgaaacttcagacaagccagatttggaggtgctctaaatgacatacgttaagaatcgtttgcgtagaaccatgatgtttgtacctggtaataatccagctatgattaaggatgctggcatttatggtgcagattcgattatgcttgatttggaagactcagtttcattaacggaaaaagatgctgccagaatgttggtctatgaggcaattaagacagtcgatttcggtggcagtgaaattgtagttcgtgttaatggtcaagacacgccattttacgatgaagatgttaaggcaatggtaaaagccggcgttgacgttattcgcttgcctaaaactgaatcagctgcaatgattcaaaaattggtaaaggatatcgaacattgggaagatgaatttgacattgaaaatggttctattggcgtgatggctgccatcgaatcagccaagggtgtcttaaatgccccaaaaattgcaaccgcaacgcctttaatgatgggcttggcggtatctggcgaagactatactgcagatatgcatactcatcgttatccagatggtcgcgaattggaatttgcgcgtaacatggttttacaagcagctcgggccgcagacgtatatgcctttgatacagtgttctcaaatatgaaggatactgaaggcttctatcgtgaaactaactatatccatgaactagggtatgatggcaagagtttggttaacccacgtcaaattcaaatggttaataaggtctttaatccaactaaagaagagattgagcaagctaagaatgttgaaaatgccattcgtgaagccaaagctaagggctcaggcgttatttcacttaatggtaagatgatcgataagccagttgtagaaaaggctaccagggttttggaaacagcgaaagcttctaacttgattgataaagaaggtaactacattggagaataaagtaaaacgcgaattaccagatgatttaatgaaaaaaatgaatttgaaaccatttgaaactactgaaattggtcatcctgaagttaagcgggttgctccaaaggtaagagttactactggacaaaataagattattgattcacttgatgaggtaatcaagaataacctgaaagatggtatgactatttcattccaccaccattttagaaatggggattatgtttttaacttggtaatggacaagattattagtatgggttaccaggatttaaccttggctccaagttcacttactggtgttatgaatgataaagttatcggagcgattaaaaagggagtaatcactaatattacttcttcgggtatgcgcggttcactaggtgattttgtttcacatggcggcttgaagaatcctgtaattttccgctcacatggtaatcgtgctcgttcaattgaagaaggcgagattaaggttgatgttgccttcttgggtgtgccagtatctgatcccgcaggtaatgctaacggtcaagatggggatgctgtcttcggctcattgggctatgccctaatggatgctcgctatgctaataaggttgttttattaactgataatattgttgattatccaaatacgcctgcgtcaattcagcaagatcaagtggattatgtggttaaaattgataaagtcggagatccagacaagattggttctggtgccactcgctttcccaaggatcctaaggaactcaagattgctcaaatggttaaccaggtaatcattaactctccatattacaagcaagggtttagcttccaaactggttctggtggtgctgcattagctgtcaccaggtacttacgtcaaagtatgattgatgatggcattactgcatcatttgctttgggtggtattactaaacctaccactgacttacttgaagaaggtctagtcagaaaagttatggatgtgcaggactttgataagggtgctgcccaatcaatggctaacaataaaaatcaacaagaaattgatgcttcttggtatgctgatcctcataataagggtgcagtggttaacaacttggatgtttcaatcttgtcagctttacaaatcgatactgacttcaatgttaatgttatgactggctcagatggtgtcattcgtggagccgtcggtggtcaccaagattccgcagctggtgccaagatgacgattattacagctcctcttgttcggggacgtaatgcgactgttgttccaagagtagaaactattgttactccaggttcatcaattgatgttttagtaactgaaagaggaattgccattaatccagctcgccaggatttagtggatgcctttagtaaggtgccaggacttaagatcttggatattaatgaattgcaaaaaatggctgaaaaacaagttggtgtaccaaagccacttgaatatactgatcgtacggttgccttagttgagtatcgtgatggtactatcattgataccattaaggaagttagggattagttcaaaacgaaatgtatgaataagtaatcacaaaggtgtcacgaaagtggcatctttttgtttttattaaaatgttaagttgtatttttgcaagaaacgttttttaattatttgtgcaaatattttattttcaagcataaatatttgcaaattctaactacgatgcagtagtaaagtcacatcgcaatatcggtcaactaagaagaaccagtgtaggtgaaatatctgcattggttctttgcgtaaaaaaacacctcgttttaagaacgaggtgcgcgtatacatatatttttctgagtaattttattatgacacaaattagattgattttcacttatttagactcattattttgttttgatgaatatttttgttaaagtgaactaatgctaatgattttttgaggggagataaatatggaaagttggttatttctagcattggtgctagttgtagcgttattgggtaaaaacatgtcattaattattgcaacgggagtggtaatggtgtttaaattattaccgtttactagtaaatggctgcctactattcaagcaaaggggattaattggggcgtaactattatttcggttgcaattctagttcctattgcgacaggacagattggctttaaggatctgattaaaacttttaagtcgccagctggatggattgccattttagcgggaattgctgtagctatcttgtcacgttatggtgttgatcaattagcagcggtgccacaggtgacggttgcattagttttaggtactattattggagtagtggttttcaagggtgtagctgcaggtcctgtgattgctagtggaatgacatacttagtaattacgctgtttaacctacatttttgaggtataattatgaaaagtgaggcgatttaatgattattgtacatgaaaatacgcaagagcgattagatgactatcttgaacaccgtttgcataattatgaaataatcacgccgccgattcctaagaaacctgagattgtcactcaagatgatcataaacagaaaaatcgaaaaccaaaaagggaccattaggtccttttaattttggtctaaataaatggattataaaatctaccatgatcaagttgccagagaccaaccacaattaataccaaaatcacggctgcgatcattacaagataatcagcttttttaaatgattgggtgacataccaggtccgttttttctttgagccaaagcggcgtaattgcatggctgttgaaattgtatcgattcgatccaaactggagaagataagaggcatcacgatattcaatgtccccttaattcgtttgcctaaactagcctttttggatagttcattgccacgtgcttgttgggcagctgagatatcccaataagaattttggatatctgggatgtagcgtagagctagagaaacagcataggaaattttgtaactaatgccgattttatttaatgaagcagcaaattgactaggattagtagttaatagaaacagcaatacgattggaattgagcagacatattttaagaaaagattgaataagtagaatacctcttgcaatgttaatgtgaagtagccggcatggatcaagatgcttttagaatgataaatattttcaccatagcttggctgaaagatgaaaacaaaaatcagatttagcaacatgaaaactacaataaatttcacgataaaagaaatctgactccacttaatttttgcctctttaaacaagaaaattgataaaatacagatagcaattaagaatctggtatcataagttaccatacaagcaaccgagactaggagcataaaaactaacttagtggttgcgtttaattgataaataaaagaatcaccaggttgataacctaaaacttggctttcattatgcatgtttttcatccctttctgcatcaatataggcgcggacaaagctatctggattttctaattgatatttgatagcgagattatataaggaggttcgcttcaaagcagcctttttaattaaagctttttcagttaataacttgattggatctgtgtcagcaattagtgttccatcagcaaaagccagggatctgttagtgtattccatcagcaagtacatatcgtgagtgataatcataattgttttgccttgatcattaagctgttttaaaaagttcatgatctcagtataagtttgccaatcttgccctgcagttggttcatcaagaattaataactcaggattaagcactaaaattgcagcaattgtgactcgctttttctgaccgaaggataaagcagagattggccagttgcggtacggataaagaccacaaactttcaaagtatcatagaccttagtgcgaatagtctgctcatcataaccacgtagacgcaagcctagagctacttcgtcaaaaatcattttttgggaaatcatctggttaggatcttgcatgacataaccaatcttatcggaacgctctttgattgaaaactgcttaaggttatcaccatcaaataaaataagtccctcattgtcgataaagccacaaataattcgacaaagggtggtttttcccgcaccattttgaccaactattgaaacaaaatcgccttgattgattgtcgctgtaacgtcatgtaaaggatgaatctgcaatttactataacggtggccgacgcctttgagttctaatagaggatgagtctcttctttttcaccacttagggtaatgttgttttgccattcttgcaactgcttagcaatttcaggatcttggggcaaagcagcgactgaagttaggtcgggaatacgcgtaaggtcgacgttagctttttttaaggcatttaaataaagaggactacgaacaccaacgtcttctaaacaattctcatgtaatagatcatttggcttcttatcagctacaatttcaccatcattaattaggataatgcgatctataggctgactccaaacttcttctagacggtgttcaataatgattactgtagcatttaattctttttgaatgcgatcaattaaagccatcgttttcattcctgaagctggggctaaattagcaagtggctcgtcaaaaagtaaaattggtgattcatcaaccatgacaccagctagagcaacaatttgtttttgaccaccagatagattttgtggcgcctgctttaataaatgctcaatccctaattcatcagcccagcgatgaacaacttgtttcatataattttgtggttggcagtcgttttccaaagcaaaagcaatgtcttcaccaacagttaagccgataaattgactgtcagtatcttgtaggatagttgaggtggtgaaagaaagatcaaataggttagtgtctttaatattattgccgttaatagtgcattcaccggtgatctcaccagtatctagattaggaattaggccgttaatacagcggccaatggtcgatttacctgaacctgatggtccagcaattaacaatttttcaccttgtttgatagttagattaatctgttttagtgttggctcggcctgactgtcatacttaaatgaaaaatctttgaattcaataattgttttaggcattgtttaatcctccttgcgcaagctgccttttttaatcttggttccagcataagctttaagtaggagcgtgccaatgaccataattgtaataccattagaaagcgtagccgaaattccttggacaaaaactttgttagcaggttcgctatagatgataatgtcaccgattggtgcaactacaatccaggcgagaatattggcaataatttgaatgatattaaaaaagattatttgtttaataccaaaaataccattttttaagtctaagcgtttggccgctaaaccgatgatccagcctaaaacagcagtagctaatacccagctccaccaagtctgcccgtacataatgaaatcggacaaagcatgtccaataaagccgacaataaaaccgaccttagcgccatagattgacgcaaaaagagccaaaaaaggaaagactaattcaatatttgtgttaggaataggcgtaggaatcgatgtgaaacgtgctaaaataacatagattgccgatccaattccgatcgctacaacatttttaactgataaacccttagtatgcatatttttctccaaaatttagtatatttacaaggtataattagtaagcggtaacagtcaagctgattgggagatccaatctatttaataaatttgtagaagaattgctaagagggtatccttatattaaagaaaagaatttataaattagaggtaaaaaatgaagcaggatgaattaaagaaaattaaccatgaaataggttcgtatgttgctaaggtaaccaagacaatttgggttgacgataggacattgcagattgccacaatgatgattgattcttatggcgataccgtatatgtttgggttgaggaagccgatgatcattgccgcgttagtgatggcggacgaattctatttaagctagatcctaatgaggaagataaagagttatatgaaactgcggaagatattgcgctagggtcaggttatgaatttgatgaaaaacactgtgaaatttttgttgatgttgatcgcaagaatgtggctcaggcggcaatgaagctggcacaattacaagtagcaatttcatatttaggctaaaaaaagacatccctaagttttctttgattagggatgtcctttatttttaagtcatttcgaaaaactttagacatttgccatccttcctaggttcacatcttgtggctttttaccattgaggtcaaaatttgcaattgcttgtgctaaagccatcattgatacaacatctggaatacattcatcaattctaaactccataatgctcacctcccagtcattgtaaatccaactttagtaattgttaaccagtacataacaaattttagcatagaaaaagcagccaatttttggctgctttttctattttttattgctatgttgcataaagataaagaaggcagaaataatattaacaatcacagcaggtaaggctagagcagcggtaaagccatatagtgcattaccaattactcctaaaattggcccaattggtgagatattcatgttatgcgattgcactactgcaacggcattaaggatcacgccgaaccaggcaaataagtaaaatattaaagctattctagcagtgaagtcagctccaaggatggcaaaccaagagctaatgaataacacacaattgatcaggttcagtgcaccaatccataaatcatatttagattttttcattttttctcctcattataaatagtctatctctgtattactttagcgaattaatcgatattttgcaaaacgcgttgggcaattgcatcattagttactagatgagtaatgataccgctacgtaaggcgccaaggagtgcctcagatttaaagcgattgcggacgacacaaaaacgaattggcgttttcataatgtcattcatgctgataccacaaatgtgttgttcgaagtcagggaaaaattcacctttaatattatatggtcgtcccatgatcattccagctacatcgcagtcaggaatgtctttaaatagttcaggtccataattttctttcaaaaattgattagcttgaaatgattggaaagtactaagaccagtgaaaagcatgtctaagtgatgataacaattttcaattactttaaaataaggctcatgtttcaaggcaggcatgatctttggatttagtatataaagtggggttggcagacttagactatgggaatgcaatttttctgctgcatcttgggccaatggattcttcctgcggttagaattaattggttgaccaagtaattgaataaagtaaagttgctctaagtcctgctcaaaaaagtcgttgatcacgccatgcattgttgcaccccaactaataccagcgatttttgcttgctttagataggtttcaatttgtttagcagcgaagttaactacggcttcactattttcatcgcggttgccggtagtttcgacaataaaagcttcttttaatctgaatcttttctgaaattctctctctagtacctgattgcgtttgattccacgcgagattttaattttaacaattccacggttacgcgcgtcttctagtgctttagcgattaaatatcgcgataaatcatatttttgtgagatatcagcaatattaagctgactaaggtaaaagtcatgagcaatgttagcaagttgttcatcagttaattgagccactttaaatcatcctttatttcaaaataacttatatgtctattataaatttaaaataataaaaaggagcagcaaattttaaaatatcaaaaattatgatgaagttcctgtggtagaatataatggttataattatgcgaactatgtgagggaaagtaataatagcatgagtgaaattgatcgagaacatcatttatcagaaaaacatcatatgaagattctgtgggaggaatttttcaagagcgataataatacgatggcgcaggatgcaacattagttgaaaagacctcgattgtaggtcgagtaggtattatgcttttaagctgtggtacaggtgcttggcgagtacgtgattcaatggatacggttgccagaaccttgggcattacctgttcaacggatattggattagtgtcaattgaatatacctgttttgatgttgataatgaatcatattcccagactttatcgttaccagcaacaggtgtgaatatgactaagttgaatgaaatggaaaaattcgttcggcaatttgaaaagggacatggggaatggactatcggtcaaattcataaacgcttacgggagatttctcagcaaaagtcagcgtattctccgttaatttcgggacttagttcaggcttggcctgcggcggctttattttcttattaggcggcggtcttcctgaggtgatctgtgctttcttgggtgcagcttgcggtcaatatattagagcaattatgggtaagcacaggttaactttggtagccaagattgcggttgcggttgccatagcctgcagtgtttactttatgagttttcatgtaggagaaatattattccacattaatcatgatcatgcctatggctatattggtgccatgttgttcgtaattccgggttttccatttattacatctggattggacatgtctaagttagatatgcgctctgggcttgaacggctgacttatgcgattttaattatcgtaattgcaacgatggcaggctgggctgtagcaacaattttgcgtttgcatccaggatctatgcctaagttaaaaattgatccagggactttaacctgcttgcgattgctggctagcttttgtggggtgtttggtttttcaattatgtttaacagtcgaccacaaatggcagctacagccgcggtaatgggagcaatggcaaatacattacgtcttagcttggtcgattatgctcaggttgctccagctttggcagcatttattggtgctttaacagctggtctattagcaagtattgtaaggaaaaaagttggttttccaagaattgcaattactgttccatcaattgtaattatggtgcctggtctttacatgtatcgagctgtatttaactttggaatcacgaatattaatatcggagcttattggatcgtagaagcgttgatgattgtcgtggccttgctattaggtcttttagctgcacgtatcttaactgataagaagtggagacatgcagattaaataaattaaggtagaaaaaagagacggattttttgtctgtctcttttagtttgctattgttaattaatcatgctttctttttgtaatagtaaatcccagtagtcctagtgctgctaaagctagaccgattaagctcaggttagaattattttgactagtttgtggtaatttagaactaatattattgtaagacttaacgatattattagtagttctagtctttgttgttgaatttggaatattattaatggcagttccatggggtggaataattccatctttgtgttgcttctgtctttgcatatcagtgccataaggatgactgctagaattccaatttacttttttgtgaatctttgtctgtttgtattcattagacttaggtggttcagacttatttggctcagaaggctgcttcggttgttctggagtagtcggagtctcagattcaggtgtaggaataggagttggggttggttccggtttagaagcggagtaactatagggtacccaaatgctaatagttgctagattgccagttgttgttttttgaccattaactgtggtagaagcaattgaagctaaaaactccgaattaggtgcaattgcggaaatcccagtaattgaattgcttgtagcagtacgtttattctgtgaagaagcaatgtgaaccacgccatttttatctaaatgataatggccatcaattatgtctttaattgtagtattgttatacggaatagctgaaaatgcttgattgtttgatattcattgtgaccagtttgtttctgtgccttgcggatccttaactaaatcaacaaccctgcttctagagtaaataacttcttttactacatttggagtaggtgtttcatcatttttaggaacagccacatctggattatttataccggaaaagttttggctcttaagaccgtttacatagtagccttttacttcttccctaactgtagcagtttgcttttctatctgcgtttcatgaactaagtaaatgatgaagtgttgatctacattttcattattatcaaagttgccaaagccgatactgctgtccgtttttaatgtggcattggcgccagaaactttttcaattttatagtgcttatttttaaataaagctaatgcttcttctaccctgctaaattgaataggggtattagctgattggtcgtctttattttggtaatcagcactaagcccttgaccagcttcatcactagtcattgagagttgaaacccattatcgttaagtagtttattgattgcttgatcggttttatcagtgtcatcataaaatctgacatctgcatgttgagttatgtagtagggaatagttaattcatagtgagtaccgtctggagttgatgaagcaataatgaattggtgttgattattgagtctaattttatcaggagtaacaatattaactaagtctgctacatattttgcattagcgtttttattaggagaaactgtgacagtatatgcttgggctaaagcgttccaagttttgccattatcaatagaatattgagtccagctttggcccgaatcttcagatttaagtttgagcatgacttcatcagatgcaaatggagtgttagatttttgacttccgttagcgtagatatggttaattacgtagctaatagttttagtttgttcagtttcactgtcagaactacctttaatttggccgttccatgagaatgttttggtctctttaagcaatccttgaccagccattaaagaagctgattcatctttttttatttcggaagcgttgttacctttttcatctgtatgaaaagcggtaatttcgactgtttgttgttttgttttttcttggtttggtgaatctttagctgaactttgattattttggttacttggatcagcttgagttgactggatggtattatttgactgttcttgattagatttttgtgaatcttgttgagtttgttcttcattagtcgcagtattagtatccgcatgaacaagttgactattacttaagaaaaaagtagtgctaagtgcaactgcagctaaaccaacagacaactttctaaaaccaaatttttgttttccattaaattttgtattgaagctcaaatcatttttgtgtttaatttatctaaaccttcttttgggaacgtaaaagactgagtcttttacaatttattatcaatgtgttctttttacatttgacaacatattagattagcacaaataaataacattgctgatataaatttgacttttttataggcaaaaactttctttttagtataaatagtttagccttatatattaaatatttataatttgataataaataactattatatagaaaataaaaaatggcatgatatcaaaccacgtcattttaaatctgttattattttttcgctttatttacttggcaattgctaatgccgtaacaacaaaggcagcgatcatggtaactacaaagccaataattcctaacaatatattcatttttgtcatcttcttctatgtaattgttatattctgtatgcggtacatatatttactataacacaaaagaagaagaataacgcaataaattgtaagcgctttttattcttttagatcaataaaaggagcatggcagaatttggctaagtcttctgggttcaaaaagacactgcggccaacttcaccactagaaacaccaatttcaggatttccttgcatagagtcatccaaatagataggaaacttttccttaaaataaattccgataggagtattagcgccatgtacataaccagttgttttggctaatttctttaagggaagcatttcacattttttgttaccagaaactttagctaattttttcatgcttaaatgttcagtaactggtacgacaccaaccaatggaccagttttatttccttcgcagacgagagttttatagactaaacgctctttgtcttctaaaatagaagtgttcatttgtgcaactccgcctttatcttcggagacagcaaattgagcttgacgatacttgattttattttggtctaagattttttcgaccaatgttttttcgagtttgttctttttatttttcttctttgacatatttatcacctgttatcatgatagcattatgccaagaaaatcccaaaggagataatattaatgaaattactaattattaaaattgatactagtcatgaagttgaagacgctttgagcgtttttgctttagataatctgaatgcattgggtattgaatcaagaaagcgtagcgactttgagcaagcaggctggttgcatgattctactgtagttgaaatggatgacattaaagacttacctaaggatacatatttctatgcttattttgatgaagaagcagataaagacgcattagtaaaaaaattccaagataagttaaaggaattgaagagctatggcctagatgtaggggatgccaaaattacaacttcatacattaaggaccaagattggaacacggcatggcaaaagtattatcacgtgattgatttttcacgtcacttggcaattgtgcctgaatgggaagattacaaacccgcttttaaggaccagcaattaattaagcttgatccaggcttagcttttggtacaggaaatcacaaaactactcaattagcaatgatgggcctagagagagcaatggttaagccaatgaatgtagtggacgttggtacagggtccggtattttggcaattgctgcatcaaaattaggagcaactgacgttttagccacagatatttcagatgaatcaatgactgcagccaaacaaaatgcagccttaaacgatattaataatattcacactcaaaagactagtttgttagctgatgttaaaggcaagtttgacatcattgttgccaatattttggcagaaattttactagacttgattccacaaatggatagtcatttaaacgacgatggtcaagttatcttttctggaattgactacctgcaattgcctaagattgaaaaggctctagacgagaatggctttaaggtcgatttaaccatgcgtcaaggtcgctggattggactagcaattactagaaaagaaaaataaatatggtaaaatattatcaattaaattaaactttgatgagaggcacaatcttttaatgaaaaaactaggaaataaaatcgaagcaattccaattgtcaggaagttgaattctcatcgctggatgtcacttgtctggtggagtattttggtaatgattttgccgtatatctttagcatttgccgtgtgccggtagtgtggcgagaagcaattctgttttttattattaacagcatcattgcataccatctaggcaatttatttattaaacttaacctgtccaagtggtggattttcttgttacctgtgcttttctgcttagcaatgttgccacattttgctttgtataatttaatgtttggtttaatttacttaataattgaagcttttggcttaatgaataaaaatatttaccgctagaggggatgatcataatgtccaaatacattgaaatgacgcatgatcaggtaattgatacctgcaaaaagtatatgaatgatgaccaggtggcctttgttgaaaaagcatatgaatttgccaataaagctcatgctggacagaaacgggcgtctggacaaccttatattattcatccaacgcaagtggctggaactttagctacattaggcttagatcctgatacagttgcagcgggctttttgcacgatacagtggaagataccccagttacaaatgatgagctgaaggaaaaatttggtgaagatgtagcttttattgttgatggtgtaaccaagttaaacaaatatgagtacaagtctcatcaagaatttttagctgagaatcaccgtaaaatgttgattgccatggctcaagatctacgtgtaattatggtgaagttagccgaccgtttacacaatatgcatactctgcaacacttacgacctgataagcagcggcgtattgcttccgaaacaatggatatttatgcaccgctggctgatcgtctaggtattgggacaattaagtgggaactagaagatatgtctttccactacttaaatcccgaagcctattaccgcattgttaacttgatggatgtcaagcgaagccagcgtgaaaaatatattgccgatacaatcaagactttgaagaagactctaaatgaattaggcattaaatatgaaatttatggtcgtccgaagcatatttattcaatctataaaaagatggttaataagcataaagattttgatgagatttatgacttattggccgtacgtgtaattgttaaaaatgtgcgtgattgttatgctgttttgggtgctgttcatactgaatggaagccaatgccaggtcgttttaaggattacattgctatgccaaaggttaacggctatcaatcactccatacaaccattattgggcctggcggtcgtccactagaaattcagattagaactgaacaaatgcataaagtagctgaatatggtgtggctgcacactgggcttataagcgtggcaattttactggtgttgagcaaagtacctctggtgaaaagctggatatggtaagagaaatccttgaattaaaggatgaaactaaagatgccggtgaatttatgaagtctgttaaaagtgatattttttcagacagagtttatgtttttacgcctaaaggtgaagtatatgaactacctaaaggttcggttacgctagattttgcctatgcaattcacactcaagttggtagtcatgcagtaggtgccaaagttaataacaaattagttcctttggactataaattacgcaatggcgatgttattgaaattatgacacagactaatgcagcgccatcgcgtgactgggttgacatggtgaagacttcaagagcacgcaacaagattagacgctacttcagaagtcaggatagagaagatagcatccagcatggtgaacaattgattgctgatatgttgcgcgatgaggatctttcccccaaagaatttatggccagggatcgaattgaaaagctattagagcactttaattatcacactgcagatgaactatatgcggcagtaggctttggtgatctttctgctcaagcagtggttaatcgcttgacggttgatttgcgccgtgaggaagaaaatcaaaaacaaaaagagctggaagaaaagattttgaattctggacaacaagcagttcaagaagaacaacctaagaagaattcaaatactacaatgaaggttaagcataaaaatggcgtcatgatccaaggcgttagtgacttaatgcttcatttagctaagtgttgtaatccagttccaggtgacaagattattgggtatgtaactaaaggtcgcggtgtaactattcaccgaacagattgccgtaatatcaccaaagaagctgaagaacaaggccgcttaattgatgttgaatgggaaaatgttgaggaaaatagtgttcaatcctttaatgcaaatattgaagtctttggttacaatcgttccaatctgcttagtgacgttattaataagttgaactcacttactaagaatattaataatatctctggtaaagtaaacgaagataatgttgcacatatgtatgtcacagttgctgtacgggatgcagatcaactagatgaaattttgagtaaattacgtgatattccagacgtatacgaaactaagaggtcagataattaatgcgagttgtaattcagagagtaaatcatgctcaagtagatattgacggtaaaactgtgggcaagattggtaaaggctttttattattagttggcatcaaaaatggtgatgaattgccagtaatcaaaaaagcagctgataaaatagctaaaatgcgtatttttgaagatgaggaggggaagactaacttgtctttaaaggatgttaacggagaaattttgtcggtatcacaatttacgttgatggcaaatactaaaaaaggcaaccgtcctagttttgttgatgcgatgcgtccaccaagatcgaaagaactttgggaagactttaatcaagaactagaaaatgacggtttccacgttgagactggtgagtttggggctgacatgcaagttagtttagaaaacgatggtccattcacgattgtgttagatctttagcgaaaaaatgagaccgcaaaggttgacaatgtcttgagaaaaatataagctaagtaagaattatcgatgacaaagaatgtggattagcaatgatctattcaaagagactgctcgttgtggtgagagagtagatagatcgcggtctgtgacacctttaacagataatggatcgtttggcgagcgttaatcgcagcaaccaaaaaggtggtaccgtgctaatctaagcgcccttgattaagttcaagggcgctttttatttttaatcaagttatcaaaatataaaaaggatgattaaatgagagttcaaaaacctaagggaacagttgatattttgcctgatcaatctggttcatggcaaaaagttgaagaaactgccagaaatttcttcaatcgcgcaaattatcgtgagattcgcacaccaagttttgaaaattatgaaatctttgctcgttcaagtggcgatagttcagaaatcgttgaaaaacagatgtacgacttcgatgataagggtggtcgccatattgcccttcgcccagaaggaacagcaggcgtagtgcgggcttatgtagaagacaagatgtatgcgccagaagttgttaagccatttaatgttttttatatggaatcaacttttagatatgaaagaccacaagccggtcgtcaacgtgaatttcaccaaattggggtagagagctttggctcaagcaacccattaagtgatgtacaaacaatcatgatgggacatgatttattgggtgagttaggcgttaagaattaccaacttcacattaacactttggggaatgagcaagtacgtcaagattatcatgatgctttggttaattatttcactcctttgaaagatgagttatcagaagactcacaaagaagattgcgtgataatccattgcgtattttagattctaaagatgaacgtgataagaagttcttgcctaaggcacctaagattcgtgaatttttggatgacgattcaaaagctaattttgacgcaatcttgaagatgttaggtcaacttggtattgattatgtaattgatgatgatctagtacgtggacttgattactatactggaattatctttgaatttatggttgaagataagagcttatgggaaagtgcaactactattcttggtggtggtagatatgatcacttggtagaagaattcaatggacccgctactccagccgttggtttcgggattggcgaagaaagattgatgttagtgcttgaaaagcaaaatcctgcattattcgagaaacgcggtattgatttctttattactaatattggtgacggtactgcacaaaaggcaattgaaattgcacgtagccttcgtaatcaaggttttgaagctgactttgatgtcaatcagaagaagttaaagaaccaattcaagaaggcagatcgtgaaggtgctaagtatgttattactttaggtgaaaaggaactggctaacggcgttttgaatattaaacgtttagctgatggcaagacaatcgatttaagtcttgaagatctaaataacatgactaaaataatggatgaattgaaggactagtaacaatggaaaagatcgaaaaaagaacagattattgtggcaatattactgaaaaatacatcggtcaagatgtaaatctctatggttgggtacaacgtgtacgtaacttaggtaacttggttttcatcgatttgcgtgaccgtgaaggcttggttcagatcgttgttaacaaagattctggtaagaagttaatggatattgccgattcacttggtaatgaatatgttgttcaagttaaggggaaagttgttaagcgttcagaagttaaccctgacatgaagactggtcaagttgaagttgatgcaactgaaatcattattttaaacaaggctaagaaccctccatttgaaattaaagatggaattgaagtctcagaacaaactagattaaagtatcgctatcttgatcttcgccgtccagaagttcaacaagcaattattttacgttcaaagattttgcgtgctactcatgaattctttgatgaaaatggttttattgatattgaaactccaatcttaggtaagtcatcacctgaaggtgcacgtgactacttagtaccatcaagaatctatccaggtagtttctacgctttgccacaatcaccacaactgttcaagcagcttttaatgggtgcaggatttgacaagtattaccagttagctcgttgtttccgtgatgaagacctacgtggtgaccgccaaccagaatttactcaaattgatatggaaatgtcatttgctgatgaagaaactattcagagttatactgaaggtcttttgaagaaaattatgaaagatgtcaagggcattgatcttaaaactccaattaagcgaattacttggactgattcaatgaacaagtatggctgtgacaaaccagatactcgttacggtatgttgattcatgacttaagcccaattttcaaggatagtgactttaaggtcttctccggtgcaattgctgatggcggttttgttaagggaattgctgttaaaaatggtgcaaaagaatactcacgtaagaagattgacaagaaggctgactttattaaacgtttccacgctaaaggtttggcttgggttaaatttgaagatggcgaattttcaggccctgttgctcgcttcttgactgatgagaacaaagaagctttgaagaaggaatttgatcttgaaggcggcgaattagtagtattcgtaactgataagtggaaggtatgttgtgattcacttgaccaccttcgtcgtgaatttgccaaagaaactggtattgttcctaagggtgtttatgactttgtttgggttgttgattggccattatttgaatacgatgaaggacttggccgttgggtagcagctcaccacccattcactatgccagatgatgaaggggttaagttgctaactactgaacctcataaggctcacgcacgtagttatgatattgttatgaatggtgatgagatgggcggtggctcaatccgtatccacaagcgctcaattcaagaaaatatgtttaaggcacttggtttcactaagaaacgtgcatatgaacaatttggttacttgatggatgctttggacatgggcttcccacctcacgcaggtttagctatcggtcttgatcgatttgcaatgatgcttgctgataaggataatattcgtgacgtttcagcattccctaagaatgcttctgcttcagaaccaatgatgcatgctccagctccagtagctgatcaacaattagctgacttggggatcgaagttgaggaaaagtaccaagacagtgtaaaggcaaccgaagagcgtcttgaaaagatggctgctgaagatgctgcagaaaattcaacttgggataagtaataaatcaatataataaaaaataagtgatctcgctttaattgagatcacttatttttttatctgaattataaattattaacgaaattactaatccgagctaaactttcttttaattgctcagttgatgatgcataagaaagacggacataaccttcaccgcccttgccaaagtagcgaccaggagtgacaccgacttttgctttttgagccagctcaaaagcgaattgttcatcattggtgccatatttttcggggatcttagcaaaaatgtagaatgctccttgcggtgtggccatttcaaagcccaacttttctaagccagattgcataaagtttaaacgtgcttcgtagatttcacgtgcttttttaggatcgttttgaccattgtttaaggcttcgacagcagctatttgaacgttatcagtaactgaagtaactaaaaatgaattaatcttgcggatgctcttcatgatttgtttaggggcagcaatatagcctaaacgccagccagtcatagcataagccttggataaaccggaaatcaaaatatttctgtcagggatgtattcagaaagtgagtgatgtttggctttgccataaacaagttctgcataaatttcatcagttacagaaaagattttgtattccttaatgacatctgctaaggcttttagagctgtggcagaataaacgcggccagttggattagaaggatcagttaaaataattgcctttgcacctttaccgcgaccattgagaacatgacgtaaatgttcagctgttaagatgaagtcatcttttttagtatcgacttgaatagggattgctccagtcattttaattagctgaaagtataaagcccaaaccggagtaggaaccaaaattttgtcaccggggttaagcaaggtcataaagacatcatttaatgcacctgttgcaccgacagtgacacagatttcactttttggatcataatgtacaccaattgagcggtcaaggtaattgctaatagcttcaagtagttctggcttaccagcttgaggagcataatgggaatcattagcctgaatatcacgaattgcggcatctttaatatgatcaggtgtcgctaaatcaggttcaccaatagttaacttaataatcccagaaatttcagagaccttttggtcaaatgctcgaattttagatgcggtcaagttgtttagtctctcattaatagttgaagttaaatcactggataaatttggcatatataaagttcctttctgtattatataaattttaaattactcattaatataaaacaactatttttaaagcaacttgtaaattgaacaaaaaataggaaactgtcaaatcttttgtgtaaatagttctttctcgtaaattgattttttaattatttatttaatcaaagtaggattctaaggtgtcctgaacctgaccaaagcctttatgaattcgattgaaataacggtcattgtagctcattgcctgaataccaataaaagcatcaagcgactgttcagttggaaactctgccttaggcttagctttgcgcttgatcacattgttaaatgattcaatcatgttagtcgaataaattgaagctctgatctgcttgggatagttataaaagaccagcagatctggttctatgtctttcaagcttctgataacatggctgtaaaccttgccccatttggtatagaagtcatgcaggacagctgtggcttcttctttgtttgtctgttgatgcacctgtttgaattcgttcatgatcttttcacgatcgtcgacgcgtactttagcgcagatattgcgcatgacatgaaccaaacagcgttgaaaatgagctttaggataagtcctggtcaaggctgttttcatgccaacaacaccatcagaaagaaaaagctcaacttgctttaagcctcgggatttcatgttttgaagcatatctgtccagacttcaatgttctcgctaggcgcaatgcagtagtcaatgacctccttgtgcccattaggcttgatgccaatggcaatatagactgcttcacgctcaaatgtttctcgatgcaaaggaaggtatgttgcatccaaatagatgcagaaaaacttgtcgcttagcttgcgcttgtgataagcctcaacctttggaatcatctgcttggaaatatttgatacctgagctggactgtaatggctgccatacatcttttcaattagatcggctatttccctggtggtcacgcccttggagtaaagcttgataatcatgctttacaagatatccgagtgctgcttgtagtcaggcagcgtgtgctgatgaaattgaccgttgcgatcccgaggcacttgcacttcaattgggccaaattgcgtatcaactttgcggaaataagcaccatttctagagttgccagtattccagccatttctggcatagggatcatagcccagaaaggcagtcaattcagcttctaacaagttattaacagcctgttgtagctctttgcgcaataaattatttattttgtctggattgaatagagcttgagcaaaatctttggtaaaatcattcatgaaggagttcttctttctgtatgtgtttttttgttcaaaccaatcatacgagaaaggaactcctttttctaatgtttaaagaaataaatttaaggaatcattcatccttacacaaactattttacagtctcaaaaatagggaagatgaaactaatcatttccctatttgtttttaagaacagtattcaaattagtataaattgctggcttaggctgagatttatctggcatttgcagccaatgaggcaaaattccatttaaaggttgaagtggccttttagtgggctgatgcaactcaagcttcctatcaacaatcttgattgtagtggcacttttatcacgtggtacagaggatgattgtggtttagtgcaggccgataagctaagtaagaatatagttagtaaaagtagtttttgcatatttttcaatttttcctccaaatataactcccaacacaatattctactatttaagcctgaattgtcaaattaagtgcaacagttaggctatgaggaaatatattgcttgaagagttcttctgctgtgtgatattgaaggattcgacgatgtttgcggttaatggcatcagttgcctgttgaacataagcagctgacttatctttcatgcttttgcctttagggaagaattgacgcagaagtccattgcagttctcattggtgcctctttcccatggagaatatgggtgggcgaagtagatctggcagcctttgatcttggtcatatccgcaaactcagagccattgtcaaacgtgatcgatttaaaccaggcaggatgtctgtcaatctcattttgaagcagcctttggcatgtgcttgcccgatagtcaggaatcttgataactacttcaaagcgtgtggttctttcggtcaaagtcattaaagcaggctgattcttgcgtctgacgcctttaaccagatctccttcccagtgcagcggcgtttttctgtcttcaatctctttaggacgctgttcaatggaattgccaagatgcttcttgtgcaaagcatgaccgctatggccgtgatgacgcttgttcctgcgtcttttgagcttcataggcagatcaatattgcttatgtccagcaagccctgatcaatatagcgatagacagttggtgtgctgggacaagggtagcctggcatagtccttttgaattcaccaacgaattcatcgatgctggtggcatcaaatttagctttaaagcgtctggagagcattctcaaaaagacagcataatgcttcaatggattgcgctgatagcagtttttgcgacgcttctcataataaatctgtgcagtatcagcgtaatagtgctcatacaataaatagctgctgtctctttgcaggacacttccgcgtttgatttcgcgactgattgtcgacttatggcagccgacttcttgagcgataacagtacgggaagttatgccggaatccagcattgcttgaatttgtccacgttgtacgctggttaattgatgatagtgcttagaaatgctagaatttgaattggtcataaagatcttcctttcttgatttttcgtcacttcaagtttaggtcttcatggcctttttgtttaacacttagtgttgcacttcaattttaaatccgggtctactatttaagtggacaatgataaaataaaaataagtttagatgacgaggaatggtaaaatgagtcgaataacaatttatatgacaggtggaatcgctgattataaggcagttaacgttatccgcgatttagaaaaagcgggtcatcaagttcaaatagtaatgactaaaaatgcagagcattttgtaactactaatacactggcagctttaacaaagtatcctgttttggatgatttatggagcaaggaaaatgaggctagcataccacatgttcatctagcgcgttggacagagttagctctggttttaccagcgactgcaaattttattgctaaaatggcaacgggaattgctgacgatgcagctagcactacaattttagctacaagtgcacctaaattggttgtaccagccatgaatgaccaaatgtggaataatccagctacacagcgaaatatagcttttctgaaagaacatggtgtagaaataatggagcctgcagtagggatgctggcagaaggctatgctgctaaaggacgaatgccagagccaggagcaattgtggcgtggatcaaaaatttcactgaacaacagaacgttttgcaaggaaaaaatattgttattactgctggtggtactgaagaagcaatcgatcccgtccgctttattggtaaccgctctagtgggaaaatgggcatttccttagctacagaagcagcagcgatgggagcgaaagtaaagctaatatatggtaatgtaagtatgcctttgccacaaaatcctaggattacattaattcatgtttctagtagcgaagaaatgttagttgcagtcaaaaaagaatttaagcatagtaacgttttaattatggctgctgcagtagcggattggcgcatgaaacaagttgcagatcataaattaaaaaagcaagctgatcaacaaactttgactctaactttagttaaaacgacagatattttacgcgaagttgctagccacaagcagcgagggcagatagttgtcggctttgcggcagaaacgaataatttgctacaaaatgctgcaaaaaagctatcttcaaaaggtgccgatatgattgtagcaaatgacgtttctaaaaatgtttttggcaatgatgaagaccaggtaacgattttacaaaaaaataagtcaactaagaaatggcctaaaatgagtaagcgaaagattgctcaaaaattgttgcagcttattgctcaaaaaatatagtatttgcatatagctaatagtgaactatatgatttatattgctcttgtaatcattttgtaatataacatctagactttttaaaaatgtgatgaaaactataatgtgaaaactaaaaataatatttagtaagtaaaagatgttttttatccttgtttaaatgataaatgctggtattataggtgttgggaattaagagactgaagagaaagagttgataggacatcatcagccctttctttttttatacgaaaatattaattttgtatagaataataaaataaattatttgataatctttataaacctagcagcattgattgatgctactattttaattagaaaatataacagaaccacaaaaaataaaatgtatgtataggatttgcaacaattttgttgtatgctattaacagatggctgaaaaaaacaattattgtttaataattgttattagctatataaatacaggaattaagaaacagagacatattagtaaaatgtagaggtgtatatatgtactctgataaaactttaatgctcaataacggagtagaggttcctcgaattcaactaggaacttggctaattaataacgatgatgtacgaaaagtaattcgtcaagcgattaatgttggttaccgcgctttcgacactgctaaagactatggcaatgaaagtggtgtgggaaaaggtatttggaactctgatgttgagagtagtgatattttttaacaactaaattaccaacttcgattaaagactatgaaggtacaaaaaagcaattgatgacgctttagatcgatttagtttggaatatattgatatgttgttaattcattcaccacaaccttggattgaagtgaatagaattaatgatcgtcactttgaaggcaatctggaaaactggagagcaatggaagaagcacttaaagccggtaaagttagatcaattggtgtttcaaattttttacaagaagacgtagctaacattgttaataacagctcaattaagccagtagttaatcaaatcgaagttcatataggaaatgtgccaactgatttgatgaaataatgtaaaaatttaggaattcagattaaagcatattctccacttgcacatggtcgtttgttaaaggatccaagaatcaggacttacgctgaaaagtatcatgttagtccagctcaattaatgttagcatttgacttacagctaggttgtattgttttgccgaagagtgataatgttaaagaaatgcaggaaaacttgaacatcgattttgaaatcagtgctgatgatatggctgatttggtcaagttaaaagaaaatacgcagaccatggctgtttaataggagcatcgcataagcggtgctttctttgttttaagggaaaaggtaatggaagaaattaagctaatcgcgatagatattgatggaaccttagttaattctaagaaggagattacaccagcagttaaaaaagcaattttgactgctcaaaaacaaggcaagcaaatcgtaatttgcacaggtcggcctttgtcaggtactcaacgttatttagatgaattagggcttaatggccaagaaaatcagtatgtagttagttttaatggtgcagttgtagaatcaaccgcggggcaggttattttcaaacaggggctaaaatatgaagattatgtagatttagagacaattgcgcgaaagctaaacttacattttcatagcgtatcgttagatcgaatttatacagctagccgtgatttgggacattatacaatttataattcacgggtcgtaaaattagaagtctcatatcgtacacaagaagaaatgaagcagataccaatcatcaaatgtatgtatgttgatgatccagactatttagatgataaaatagaatctcctttatttgaaatgatgaaagatcgagttgtattttcaaagactgagcctttttattatgaagcaaccgctgccggtgtcgataaggggactggcctgaaaagactatgtgactacttaaaaatagatcgaagtaatgtgatggccctaggcgatcaagcaaacgacatgccgatgttaacttatgctggattaggtatcgcaatgggaaatgctgttgaatatacaaagcaacatgctgacgaagttacggctgattgtgaccacgacggtgttgcagttgcaatcaataaaatattaaagtagatgttttctctttcaaatagtggtatttttactttaagatgaaaattgaatagaggtctaaaaataatgaataaagcaaaagttttagttttaggtggcttaagagatgaggccttaactgatttaaaaaatatttgtcaagttgatatcggtccagtaggacatcgaccagaagatgatcgtgagtgggtgcttgatcatattgcagaatatgatggtgtgatcgtagcaaagatggcttttgatcgagaaatgattgatgctgcgaaaaatttaaaaataatttcaacttatggcgttggctttgatcacgttgatgttgaatacgctaaagaaaaaggaatagttgtttcaaattgccctaagagtgtgttgcgtccaacggcggaacttgcctggacaatgattatggcatcagctcgtagattgcattattatgacgatgctttgcgtgaaggcgtctttttaaatgccgatgagtacgacaaccaagggtactccattgaaggaaagaccttaggaattgtaggtatgggtcgaattggtcaacaagttgctaggttcgctaaagcatttggtatgacaattatttatcataatcgtcatcaagtagatgatcaaattgcagcagaattagatgctaaatatgttgacttagatactttggcaaaagaagctgattttgtgagtttacatactcctgctacagctgaaacatatcatctggttaattcagactttttaaagaaaatgaaagacacagcgtttttaattaatgttgctcgtggatcgttgattgacggggatgcattaattgctgcgttaaagaatggttcaattgcaggcgccgccttagatgttttcgaaaacgaaccgcatccaagacctgaattggttgaaatggataatgtgatcatgacgcctcacgttggttcagctactcacattgctagatttaatttgtctaaagaagctgcgaataatgttttgtctttctttaaagatggtcaggcaattaatcaaattaactagttcaaacagagctaaaaaagacgattcatgcgaatcgtctttttctttacataatttttactgatgttaatcatgatcaagctgactatggtggtagccataaataaagtaaattacagcaccgatgattaaccaaatagctgccattaagtaaacttctgaacttaaatggcaaatcataaagatacaaattaaaccagaaatgattggcaaatatgggtatccgggaactttaaagccatcgttaacaatatctgttctttttcttaattttagaattccaaaggaaacaagagtaaaggcaaaaagtgtaccaaagttgaccaaattggctagttgatcaacggagaagaatgctgcacctgctgcaataataatagtgacagcgactaaggcattttgaggagagttatgttttttatctaatttactgaatgcactaggcaatagcccatcacgtgccatagcatagattaagcgagagcttgaatagatcattgtcagcatcatggtagccattcctagcatagcaccaaatgataataactctgctacccagttttgatgaacatattgcaatgcaaaagcaacgggattagatacgtttagcttggtataattaaccatacccgttaaaacgattgaaacgccaaaataaagtacagctgcaatagctaaagtgccaataattcctaggggcatatttttcttaggatttttaacctcggcggctgatgatgaaacaacatcaaagccaagaaaggcaaagaagactgtggttgctcctttgatgactcctgaaaaatgatatggcaagaacggatgatagttgttaggtttaatgaactgtaagcctacaaaaataaaaattaaaataatggcgattttaataaaaacagctacgacattaattttaattgagttcttcatccctcgtgacaacaggatactgataagtaaaatgattaaaacagaaaccaagtcaaaataaacgccattgttaagattcataggaccagaaatagcgtgtggaatttttagaccaaatggtgcaatgaaagaactgaagtatgatgaccaacctgctgccacagtggctacagatagcatgtattccaaaatcagtgcccaaccgataatccagcctgtaaattcgccataaacgatattcccatatgaataggcagaaccagctactgggatcgctgaagcaaattctgcataacacattccagctaaagcacaaacaattgctgcaacaacaaaggataaactaacgccaggtccagttaatgtggctgcaacagttccgggtaagatgaaaataccggtcccgatgacagctcctacgccaagagacattaaatcaacggcgttcattgttttggagaacttaatgtctttaccgagatagttctcaacattttgtttcctaaaaatattaaatttcattcgcaaacttcccttattatagattagattaattttacatgatatttttaatttttaaaagaagaaaacgctctatattttttatagagcgtttgaattaatcagctttaattttttgcttataccatttacaggaaaaatatattaaagcaattagaataagtcctccaataattaatgagtattcttcaaaaattaacacaatttgttcccaattttcacccatataggaaccaagaccaactagaatagcattccagagtaagctgcctaagctagtgtaaataaggaaattaggtaatttaactttggctattccagctggaattgaaattaagctacgaactacagggatgcagcgaccatagaagattgcaccggtaccgtatttatcaaaccatctgatagccttttgtacatcaccctttttaaagccaagtagtttgaataacttatgatcgaacaacttttctaatcgatctggattaagtaaagtgccaatccaatataaaactagtgcaccaactaccgcgccgattgttgaagcaataattacaccgaagacattcatttgagaatgatgggttgcaaagccagcgaacgatagaattacttcggatggaatagggggaaagatgttttcgattgcaattagcaaactgatggctaggtagccaaattggttaattaagtcaaaaactagattagtcatcaaaagttctcctcaaattttatttcttttaatatatcaacttttgtaccgaatagctatttctataagcaaagttaagatcttcttaaacagtctgtgttaaactattaaatgcaaattttttcagtgagatgagataatggcaacacaattaattgagaataaactaaaacttttaccagaaaaacccggctgttatttgatgaaagatattaacggtacggttatatatgttggtaaatctaaaaatttaaaaaatcgggttcgctcatattttaagagtaaacaggttggacgtcgtgctgaattagttcgtgaaattcgagattatgacatcattactgtatcaactgataaggaagcttttttacttgaaattacattaataaaaaagtatcaaccttattataatgttcaattaaagcagggtacgggatatccttacatagaaatcacgcgtgaacatgatccgcaaactcggttaactagtatcgttcataaggatggtggctactattttggtccctatcctaatgtatatgctgcccaggccactttgaagtttattcaaaaagtttttccactaaggcgctgtcatggttatcaaggcagaccttgtctttactatcatatggggcagtgcttaggtgcatgctttaaaaaagtgccacaaaaagaatacgaagagcaaattaaaaagatcaagagctttttgaatggagatattgctagtgttaagcagagtttgaccgaaaaaatggctcaagcagctagcaatcttgaatttgaacgagcagccgaaattcgcgaccaattgaaatatattgaagaaacggttgaaaaacaaaaaattatttccaatgataatacgcagcgtgatatttttaattattacgttgacaagtcttggatttctgttcaaatcttctttttacggcaagcaaagttattgcgtagagaaaccagaatgtttcctttgacagatgccacagatccagaagatgctttcacttcctttattgtgcaattttatgggcaaagaaatagggttttgcccaaagaaattctgattcctgaaggatttgataatgctactttagctgaggttttgaaggtacctgttagaacaccgcaacgagggcagaaaaagtcattgctagacatggcgaaggataatgctaagttaaagctagatgataagtttagattattagaactaggtaatcgaaaaactaaaggcgctcaaaaagaaatttttgatgctttaggcttaccatatggacactttattgaaagttttgatcactcccatattcaaggtgctgacccagtctctgctttagtcgtttttaaagatggtgaacccgaaaaaacagcttatcgtaaatataagctaaaaggtgaggttgaacatcaaaatggtggcgacgaagtacgcaacacgagggaagttgtccgccgaagatatggtagactgttgcgcgagcataaaagaatgcctgatttgattttgatggatggtggtcaaattcaggtcgatgcttgtttagatgttttacgaaatgaattaaatttgaatatcccagttgcggggatggttaaagatgataagcacagaacaaaccatttattatttggcgatcccatcaacggtattcctttgaaactgattccccttaatcccaaatcagagggcttttatttaatgacgcgcgttcaagacgaagtgcaccgctttgcgattacttttcatagaagacgccatgctaaaaatgctttgtccagtcgtttagattcgattaagggaattggtcctaaaagtcgtaacaaattattgcgcgaatttggttcattgaagaaaattaaagaagcttcaattgatgacttgcgtagagcaggattaacgcttactcaagcacaaacggtaaaattaacattgtaatccgagaaaacgcgatatcatgcgtatttctgtggtatagtattaaaagctagattaagacggaaggaagagatatacatgcctacatttgttgatcaaactaaaatcgaagtacaagccggaaaaggcggcgatggcatggtggctttccgccatgaaaaatacgtccctaatggcggtccagccggtggtgatggtggccgtggcggcagtattatttttgttgctgacagcggcttaagaactttgatggattttcgctatcggcgtaagtttaaggcggatagtggtgaaaatggtcgtattaaatcacaatatggccgtgcagctaaggatctttatttaaaagttccagttggtactactgtatatgattatgacactaatgaattgattggtgatttaactgaaaagggccaagaactagtcgttgctaaaggtggtcgcggcggtcgcggtaatatccattttgcaactagtgttaatactgcaccagaaattgctgaaaatggtgaaccaggtgaagatcgcgttttgcgcttagaattaaaattattggctgatgtcggcttagttggttttccgtcagttggtaaatcaacactgttatcagtaacaactaaggccaagcccaaaattgctgcttatcaattcacgactttaactcctaatttgggaatggttatcttgccagatggtcgtgacttttcaatggcggatttgccaggattaattgaaggagctagtcaaggcgtaggcttgggaattcaatttttacgtcacgttgaaagaaccaaagtaattctacatctagtttcaatggatcctaataatggtcgtgaggcaattgatgattaccataccattaaaaaagaactcaaaaattacgaaacagatttatcaaagaagcgagaattgattgtagcttcacaaatggatattcctggtgctgaggaaaaactagctgagtttaaaaaagcattaaaagcagaaggaaataatgaacctatttatgagatctcaagtgtaactcataaaggcgtagataagttgatgtcagatactgccaacttagtaactgaagttgaacaagaacaggctgaagaacaacctaagctagcacaaaagattaaagaatataagtatcaggcaccacaaaagaatgaatttacagttgagcaagttggcgaacatgaatttatcgttaagggtgaacaattagaaagattagttcaaatgaccaacttggatcaccaagacggtattatgcgtttagcaagaaagcttaagcgtttaggtgttgatgacgcactacgtgaaaaaggagctgttaatggtgatgatgtggctattggcaagtttgtctttgaattcgtacaataagagtagagatagggtatgaaaaaaaataggtttattacggggtattctggccttagagccttagcagttatcggagtaattctttatcatttggatcctaattcctttatgggaggatatctgggagtgccgatttttttcgtgctctcaggatatttggtgacagatcatatgtttaattcatatgataaaacaggatcatataataatcgtcatttttatttgagtcgaataaaaaagttatatccacaattaattactgttttatggttaagtgcagcctatatctttatctttcaacgaaatttactggctaaattaaatcaggttgtacttgcaaatctattaaatgtatttaatttttggcaaattcataatggtcaaagctattttgagcgttttgcagctaatgaatcaccatttactaatttatggacgatgtcaattgaaggccaattttatattgtttggccaattgtcatttatttactagttaaattggttaaaaagaaaaaaaatattttctggattttagttggtctatcagctgtttctgcattagaaatggcaatcctatactttttaaaggctgatattaatcgaatttattatggaactgatactcgtttcttttctttaggattaggagcagcattagcagttgtttggccgatagagagtttaaatcagcaagttgaacgaaaagtaggctggatactggacttggtgggccttgcttcatttgctttaatgttagcaatgtttttctctaagtggatgaatccacaacaagcctttacttactctggcgggatgttgttatttactttagatgtatgtattttagtagcggtaattgctcatcctggtagtcattggaatcaaatcctaactaataggttatttgattggattggatcgcgaagttatggcatctatctgtatcaatttccagtaatgatcttttttgaagataaggtaaatattggtgataatccaatgctgtatcaccttattgaagtgattttaattttagtgattacagaaattacttatcgtttgattgaaagaccaatgggtaggattacctgggataaaacgaagcaatattttgctcgaatttttaattttgaaacaaaagattactttaagaaaggtcaagcagccttagcagctttgattttaatcttaggatcagcagctattgctatttcaccaggagtaaaagcagaagactttaataaaagccaattagcacagcgaattaatcagaattctaaaaaacaaaaaacggataatgctaaattaattgaaaagttaaaaaaagaaaaaaagaaaaaagaaaaaaaatctaaaattattcgtgaagctgagcttcaaactaaaaagcatcctattaacaaatcctttgttaaatatggtatttcccagttagatttgcaatttgctcaacatgttcaagtaactgcgattggcgactcggtaatggccggttcgagcaacgatttaaaacgattaatgcctaaagcgttaattgatgctgctgtttcaagacaattgaatgttgcttttggcttattagatagttatcaaagtcaaggagttttagcagataatatcttaatagggttaggaactaatggacctttctcaatggaagatcttgatcgaataatgcatcaggctggacctaagagaaaagttttctggattaatgttcacgttccaactagagattggcaaaattcagtgaataatttgctaaatcaaggtgcaaaacggtatcataatcttataataattgattggtattcatactcgaagaatcatcctgactggttctacggtgatcatactcaccctaatttaaagggctcaaaatactatagtgcattagttaccaaaacaattgttaagcattcaaaattttagattagaataggattttcatggaattacaatttttaggtactggtgctgggcaaccttcaaagcaacgcaatgtttctagtgttgcacttaagttgctggatgaattgaatgaaatctggctttttgacgtaggtgaagcaactcagcatcaaattttaagaacaaatattaaattacgaaaagttaccaaaatttttatatcacataatcacggtgatcacatttttgggttaccagggttattgtcaactcgttcttttcaaggtgatgttggtcctattactatttatggtcccagtggtattgaagaatttgttagaacagctcttaaggtatctcggactaaaatttcatattctataaggtttgttgaattagctaaatcagggttaatctgtgaggataagggctttcgagtgtatacggagcaactagaccaccggatacctagttttggttttagagtagtggaggcttcacatccaggcgaattattaattgacaagttagcacagtataatgttcctaatgggccacttttggggaaattaaaaaatggcgaaaaagtaactttagctgatggtactgttttggatggtaaaaatttcttaggacctactaaaccgggaagaattgtgacggtcatctatgacacacgttccacgccaagtattgctcgtttggctaaagatgcagatgttttagtccatgaatcaacttttgcaggggatgaacaaaaattggcgcatgattattatcattctacttcggttgaagcagccaaaattgctcggaaagataatgttaaattattatgtctaaatcatatttctgctcgttatatgggtgctaaagggaaaaaactcgaaaaacaggctaaaaaagtattttctaatacagtattagttaatgattttgatcagattaatattccaatgaaaggctcagaaaaatgaaagactcattaagaaataaagttgttgtaattacaggtgcttcaagtgggattggacgttccattgcccttgaaagtgctggtcgtggtgctactgtaattttaattgctagaagaaaggaccaattagatgaaattgcagcagaagctaaagaactatccggtgctgaagcatatgtttttccaacagatatgggtaagccggaagaaattgaacaaacctttaatgcaattactaaacaagtaaaacacattgactttttagttaattgtgctggttttggtaaattcgaagaatttatggaccaaaaaatgcaagacgttaccaatatgttccaagttaatgttttaggtttgatgtactttactcgtttagtaggtagggtcatgatggaacaaaagactggtcaaattattaattttggctcaattgctggcaaggtaccaactaccaagtcagccgcttacagttcatctaaggctgccgtaattcaattttcaaatgtcttacggctagaattaaagccatttggtgtcaaggtaatgactgtaaacccaggaccagtttatactaatttccttaatgtagcagataagactggaaattatgtcaaaaatgttcaagaatttatgttggatccagatgatgttgcttggcaagtagttcacttctttggcagtgataaacgtgaattaaatttaccacttagtttagctgtagcggctaaattgtataatctatttccatcgattggtgataagatttccttaaagtttgcttctagaaagtaaaaaaagatggaaaaacaaagaaatttaattattggatcagttgtggctttaattgcagtaatttttgttgttttaaatacatcacctgtcgcaattaattttggcttttttaaggtgaggttaccactaattgttgtgttagtggtaatggtgattatcgggatgattattgcttggttctttggacgagatactaaggaaaaaacggatcacaaggtcactttcttcaataaaaaagagaagaaaatagaataaatcttgatttattagcaattgaatagtatgattgaactacgtgagtgattcggggttatatgaccctgaagcttaagactacaataaaggagatcaaattaaatggcagttcctgcaagacatacttctaaacaaaagaaacgttcacgtcgtggtcacattaagttgagtgttccagcaatgcactatgatgcaactactggtgaataccgcttaagccaccgtgtttcaccaaagggttattacaagggtcgtcaagttgtaaataacaacgacaacagcaataactagttaaaggacacctttgatatggtgtctttttttatgcctagaaaaaggaaaaagaaataatgaagttagtatttttacattctagtgatacacatggatttttattgccaactgattaccaaaataaaaccgactatcatgctccttttagtttgagtagagttagctcagttattaaatctgaaaagaaaaagtatggtgataacaatgttgtagttaccgatgcaggtgattgtttgcaaggctcaccacttgcttcctatgctcattcaactggcgattatagtgatttacgtatttttacgcaagcttataatgcagtggggtatgatgctcgctgtttaggtaaccatgattttaactttggattagattatttaagctactatgttgataacaatgaggcaccaatcattaatgataatgtactggatgcagaaacagaagttccattttttggtagagaatacactattatcaagagaaatggcttaaagattggtttattggggattacaacgcaatatatcccacattgggaacctaaagaaaatgtaaaaggcttaaagtttgcctctgcttacgaaaaaattaagcattatgccaaaatattacgccctcaggttgatattttagctgtgatgtatcatggtggctttgaaagtgatcctgaaactggtaaggcgactgaacctaatcgtggtgaaaatgaaggttatcagattttaaccaaaattccagaagttgatgtcctattgacaggtcaccagcatcggcgcttaaatttggttacacgcgatactgctattgttcaaccaggttatcgcggtgaagctgtagctgaagtggttcttgatattgatgatgatactaagaaaatcaaatcaatgtccactaagttgattgacactaaagattatgatcctgatcctgtaattgttgatattgtatctgacttggataaaagaacacaaaaatggctagatcaaccaattgcacatttagataaacctgctcgaattgaaaatgcaatgaaaggcagaatagaaggcgcgccatttattaatttaatccagcaaatgcaattatggtttactaaagctgatgtttcggcaactgcagtgatgagtgagactgctaagggatttgataagaccattactatgagagatgttttgttaaattatccgtatgctaatcagttgtgtcgtgtgaagctgactggtaaagaattacgtcatattattgagcactctgctggctttttgaagaaagatgaagcaggaaacattggctttattgatcgatggattaagcctaagccaatgttgtatcattttgacgtcttttatccagtcgaatatgaagcggatttatccagaccagtaggtgaacggctgactaaactaactttgcacggtaagccaatcaaagatgatcagatttatcatttagcagttaacaactatcgtgctatgggtgggggattttatcctgaatatagtatggacaaaattgaaaccactttggataaggactatgtacaaatgtttagcgaatatttgactcatggaccagtcgaagtagatacaaaaaagaattataagttttactaaaccaaacgaaaaagacgtgagaataaaaacatctcacgtcttttttgaatagattgaataattattttaacttactgtatttactattatctttgtgtgaacgagcagtaatagtcgcaataattgctgagaaaagaataccaaaaatgatcccaacgattacacaatttcttaaatctgtgccgttgaatgaagcacttcgggttaaaggaccagcaataaagcctacaactaacatgtagattacgctccatacagttgtgatgatataacgacccataatgattccttctttcgtgtaagattttatcaaaaatgaagcgcaaattcaaacctgattggttcaatttggtatacttaatttaatgtttgtaatgacgaaaggtggttaatttatgcaagtagcagcacttcaaaacataagctcctttacgcttttaagtagtccaaccaaggtaagtgatttgataaaagacgctaaagagaagggctatcctgtggttggtttagccgacgtgaacgtgacttatggtttggtcaatttttatgagttggctaaaaaggcgggaattaaaccacttcttgggatgcaactgcgtttaaatggtttggttgatagcacccaaaaatatgatttgctagtttttgccaaaacaaataagggctatcataatttattgcgactttctagcgcggtaaatttgttaacggaaaatgggcaaaacgataaggtcttaacgctgaatgaattaaccaaatatttagatgatttgttgattatcgtaccagctaatctaaaaagtgaattaatggcgctgcatgatacaaatcaggcattaggcagtgattatgttcgccaactaaagaagttaacgtttgatctttatttgggtgtatatgcttcaaaagcaagtatagattacattgattatgtccgtggattagctaagcaatttgaattatctttagttgcagtggaagatagtcaatatttacggccacgtgagcaatttttacaaaaaactttgcgtgcgattgctaagggagataaattgcaagatatattgccactagctaagcaagctggttcgcattatttagattctgcacaaaatgttttagaacgctatcatcaatatgacttggatgatgcaattaataatacttggaaaattgctcagaaatgtaatgctgaagtgatctttcaaaaaccggtcttacctaaatatcatcaagataagtttccgacttcagaagaatatttgcgttatttggctcaaactggtttacaagcgcgctttggtcaaaaaagtattccagccgagtatcagaaaagattaaattatgaattacgagtcatcaatcagatggggttcgatgattattttttgattgtatgggatgtaattaactattgtcaccgagtaaaaattactactggtccaggacgtggttcagcttgtggttcactggtttcatactctttgcgtatcactgaagttgatcccatccaatataatttactgtttgagcgttttttaaatccggctcgtcatgagatgcctgatattgatctggacattcctgatattcaacggaatacagtaattaagtatatgtatcaaaagtatggcatggatcatgctgctcaaattttgacttttggtacaatggctgctaaacaagtattaagagacgttggccgggtttttggcttaacaggaccagaaatcactaagtggactcacgcaatcccgtactctaaagataaaatgggattaaaaaaagcatatcaagagtctagagaactaagattattggttgatgcaacgcctgagaataaattgttatttaagactgctttaggacttgagggattgccaaggcattattctattcatgcggctggattggtgattagtgatgattcgattgctggcatttcgggattgcaggctggtcctttcggcattcctgtaactcagcaaaccaaaaaatatgttgaatcattaggtttgctaaagatcgactttttgggattgcgcaatttgacagttttaggcaatattttagctttagtgcggcagcaaggtgtaaagctagatcctaatacaattccgttaaatgatcccaaaacaatggaactgtttcaacaaggtaaaacagatgcagtcttccaatttgaatctggtgggattcgtggtgttttgcgtaaattgcatcccgacaattttgaggacctagtagcggtgaacgctttataccgtccaggtccaatgcaaaatattgacgcatttgttgcaagaaaaaatggtacggctactgtgcattatcctgatcccagtttaaagcaaattttacaatcaacttatggaattttggtttatcaggaacaagtcatgcaaacagctcaaatcctggcaggattttcattgggtgaagccgatattttacgacgtgcgatgtctaaaaagaatcagaatgtcattgagcaagaacgtggaaaatttattgctggtacggtcaaaaaaggtcatcctaaagaagtaggtgagcgagtttatcattatatagagcaatttgctaactatggttttaaccgttcacacgcggtggcatataccaagattgccttttggctagcttatttgaaggttcattatcctgctgcattttacacagcgatgctcaattcatcaacgtctgctaaagtgcaaagctattcgatgcaagctcaggaagctggagttcgtattttgccgcctgatatcaatcacagccaattagactatactttacaagatggcaagattttagttggtttaaaagcaattaaaggattacgtcttgattttgctaaggaaatagctgccaatactaaaccgtataagtcttttaataattttttgcgtagaatcgatgctaagttcttacaagtagacgcaattgaagcattgattatggctggagcatttgactcaatcgaagataatcgcaatgagttattgcttaactgcaaagatgtaattgctaatgtgcaattaacgggacaaaatatgtctttatctgagattctgggggatgcaccacttaagcctgctgagccaccgactgctgcccaaaaagcagaaatggaagagaaagctttaggctttactacaacaactactcctctaatagctgtacaaaaatatgcacaaaaatttaacgctagaccattgaatcaatttcagttaaatgatagtggtattagcgtgggtaaattaatgaagttaaagcaaattaggaccaaaaatggaaaaacaatggcttttgctagttttgctgatacatctagcgaacaagaaattattatttttccaccggcttatgaaaaatttggctctattttaaaagaaggagatatttatttactaggagtcaaggttcaaggtgatcgatttgaccaaaataaaaaacagtatttcttaaccaatttgcgaaaagttaattttaaagaataaagttcaaattacaaagctatctttgacgatggatgtaagtgctaacaaacttaaatacggaaagaaagcataaattagcccaatttttgtgagcttttttgcctaaaaaatgttaatatttatgtgatgtgagaaattacacaaaataatcatgatgaggtgaattcatgaaacggattggtattttaactagtggcggagacgcccctggtatgaatgcagcaattagagctgtgacgaagactgctatccatcatgggcttgaagtctttggaattcgttatggtttcgctggtttggttgcaggtgactttgttccgcttaccacggaaaatgttgaccacaagattagtgaaggcggtactttcttgtacagtgctcgtttccctgaatttgcacaagaagaagtgcaacaaaagggtgttgagcaattaaagaaacacggtattgatgcggttatcgtaattggcggtgacggttcataccatggtgctttagccttgactcgccacggcgtaaactcagttggtttaccaggaactatcgataatgatattccttatactgactacacgatcggctttgattctgcttgtcgtactgctatggatgctatcgataaaattcgtgatactgcaagcagtcaccaccgcgtattcgttgttaatgtaatgggtcgtgaatgtggtgatatcgctatgcgtgtcggtgtagcaagtggagcagacgcaattgtaattcctgaacgttcatacgatgttaaggaaattgcagaaactcttactcgtggttttgcagatggcaaagatcatggtatcattgttttagcagaaggcgttatggctgctgataagtttaaggacgaactccttaaatatggtgactttgatgctcgtgctaatgtccttgcgcatatgcaacgtggtggctcacctactgttacagatagagttaatgctactaagatgggtaattatgctgttaagttacttctcgatgggaagggcggtttagctgtcggcatggagaatggtgaacttaatacccacgacattcttgatttgtttgacggtaaacaccaaggtgattatgcgttattggatgtaaatgaagaaatgactaaatattaatttagttgatttttggagaggatttttttaataatgaagaaaactaagattgttagtactttagggccagcttcaaacgatattgaaactattactgctttagctaaggctggtgcaaacgtattccgtttcaacttctcacacggtgaccacccagaacaccttgctcgtatgaagatggttcgtcaagtggaaaaggatactggtttacttcttggtatcgaccttgacactaagggtgctgaaatcagaaccactgaacaagaaggtggcaagttcactattaatactggtgacatgatccgtgtatcaatggatgccactaagaagggtaacaaggacatgatccacgttacctacgacggtttatacgatgatacccacgttggtggtcacgtattaatcgatgatggtttggttgaccttttgatcaaggaaaaggacgactcaaagagagaacttgtttgtgaagctcaaaacactggtgtaatcggttcaaagaagggtgttaacgctcctggtgttgaaattcgccttccaggtattactgaaaaggatactgatgacattaagtttggtttgaactatggtattaacttcattactgcttcatttgcacgtaaggctcaagatatcttagacatccgtaagctttgtgaagaagcaggtgcagactacgttaagatcttcccaaagattgaatctcaagaaggtatcgacaacgcagacgaaattttgcaagtttcagatggtttaatggttgctcgtggtgacatgggtgttgaaattccatttatggaagttccatttgtacaaaagagcctaatccgcaaggctaacgcacttggtaagccagttattactgctactcaaatgcttgactcaatgcaagaaaacccacgtccaactcgtgccgaagtttcagacgttgctaacgctgttcttgatggtactgacgcaactatgctttcaggtgaatcagcaaatggtctttacccagttaaggctgttaaggctatggctgaaattgacgaacgtactgaaaagcaaatgcttaagcgtaatactttagctcttcaaagattcgaagcttacaagggttcaaacgtaactgaagctatcggtgaatcagttgtacgtactgctcaagaattaggtgttaagactatcattactgcaactaactcaggttacactgcacgtatgatttctaagtaccgtcccaatgctgacattattgctatgacctttgacgaaaaggttcaacactcattgggtatcgtttggggtgtacaaccagtattgactgaaaagcctaagtcaactgatgacatgtttgaaatggctgctaaggtagctaaggaaaagggttacgtaaaggatggcgaccttgtaattatcgttgcaggtactccacttggtgactcaggtacaactaacttaatgaagttacaaatcatcggtaacaagttagttcaaggcttaggtgttggtaacggttcagttatcggcaaggctgttgtagctaactcagctgaagaagcaaatagcaaggttaaggaaggcgacatcttagttgctaagactactgacccagactacaacccagctatcaagaaggcttcaggcttagttgttgaagcttcaggtttaacttcacatgccgcagttatcggtttatcattaggtatcccagttgttgttggtgctactgacgctactgacaagatttctgatggttcaactattactgttgacgctcgtcgtggtgctatctaccaaggcaaaatttcaaacctttaattttaagaatataatttagatagattagctaatcaaaaaatagccagcttaagtgctggctattttattttgcataaaaatctcttatacttatatgtaagaatatgtaaagtaggagatttttaaatgcttggaacagttcgtaaaggaaaaattactgacgaaaacgataaagcttattatgttcaaattgatggactgacttatgaattgaagaagatcgagattacgcaagatgatattcctaaaattggagatgaagtcgaaggttttatttatgataataaaagtcatgatcgagaaatgacacaatttttgccattcgcgcaacccgatcaatatggttggggaaaagtaaccgaggtacgtccaggcttaggcgtctttgttgatgtaggtctacctgataaagacgttgttttatcaatggatgatcttcctagagaaaaagaaagatggcctcgacgtgatgatcgacttttagtaagattagaaactgacgaaaaagatcgtatttgggctaagctagcagatgaaaatatttttgaccaattagctgctaactttccacgtggaatgaataatgaaaatgtctttgcaacggtttatgttacacgagagataggagcatttgttttaactagtgattattatcttggctttgtacatgaatcgcagatgccacgtcctatgagactaggtgagcaattcaagggtagagtagtcggtgtcagtcaatatggacgtttgaatttgagtgctttgcctcgtgcttttgaagaaattgatgatgatgcgcaaatgattttgatgagtttgcggagaagagaaaccaagactctacctttctatgacaaatcaagtgcacaagaaattaaatcatactttggtatttcaaaatcagcttttaaacgtgcggtcggtcatttgctcaaggctggattaattgaagaagataaaacagcaggtacgattactttaattaaggatccagaagagaacgataatggagaagattaatttaaaagatcaaattgatgattatttacgctatagtcaagttgaacgaggattaagtgataatacaattaatgcttatcgtcaagatttagaagaatttcaaacttttgtagaaaatgaaggtatggcttcatggccaactgaagcaagcgatgtggatgcgtttttagctcggcagcgtgatttgaacaaagcaaccagctcaattagtcgacttatttctagcatgcgtaaattttatcaatggttagctcggcaaaatattcaaaagttaaatccaatgttggaaatcgatttgcctaaaaaagaacgtcgtttgccgacagctctctctcaagctgaaatgaataggctacttgagcagccaaatactaaacgaaagttaggtatacgtgatcgtgctatcttagagacattatatgccacgggaatgagagtaagcgaattaattaatttggagttgcaggatttacatgacgatttaggcttagttcgggttcttggtaaaggcgaaaaagaacgattgattccaattagtcctgttgctcttgattggataaaaaaatatgaaaatgaagttcgtgatccgctaattttacaagtagggaaaagcgatgaacatatttttttaaataatcgaggaaaaaagattacacgacaggctatttggcagatgatcaaaaagtattgtcaaatggcggcaattactaaagatgtcacgccacacactttacgtcatacgtttgcaacacatttgctagaaaacggcgcagatttgcgagtagtgcaagaaatattaggacattctgatattagcacgacacagatctataccaatttatcacaaaagcaaattttaaatgtttatcagaagacacatcctcgtctttaggtgattaaatgctaatacaatataaaaaagattatgagaagatagcaatgggattactatcctatttacctgattttaaaaatatcgaaaacttaaaagaagaaatcacgcttaatcaggatgaaaatgactttattttgtatctttatcgtaatagtcaaaataatatggtgggcgtaataggaacccaagtatctaatcagtttgtaattattagatatttgtctttagctcctggttttcgtgagattagttatgaacggaaaattgttgatgaactaaagcacgaatatccagataaacgaataactgctgtaccagaatatacaaatttattaaaaacgatagaagaagataatggacaaaagtaacttaactttagaattaccgaattttgaaggaccacttgatttattactgcatttgatccaatcgcaaaaaattgatatttatgatatcccaattgcccaaataactagtcaatatttagaatacttgcgccaaatgcaaagcttaaatttacaaattgcaggcgagtattttgtcatgtcatcaactttattgcgaattaaatcacagtatttgttgcctcaaaacgattttgtagatgatattcaacctgatgaagatccaagagacgaattagtgcaacaattggtacaatattctgtgtttaagaaaatatctgcttattttaaagaacgtaatgaagaagtaccgattacagttgctaaagaagctagtgtatcaaccactgctaaagttcaaccgctgcctaagggtcagataactgcacaagaattagcgacgacttttacgatggtcttacatcgtttgaagttgcagcaaccagataccgcttcaattagagtagcagaaacgccgatcaatgagatgatggattttttgcatggacaattgaaacgaaaaaggcaagttagtttctttgcttgcgcggacaaaatgcagaatatctcagatgttattggcttatttttagcgacactagaattgtgtaaaaaacaattaattcagattacacaagcacgtgaattcggtgatttaaatttagaaagaattgatacgaatggcaagtaaactagcaaatttagaagctcttttgtatgtcgcaggtgacaatgggcttgaggagcaaaatctaattgaactacttgaagttgatggtgaagagctaggtcagttagtcactcgtttgcagcaaaaaatgaaggctgatccagactcgggaatgcaaataattcatattgcaaatacttataagatgacaactagtcaacagacagctaagataattgaaaagcattttcaaaaagatttaactaagaatttgagtcaatcagcacttgaaattctctcaattattgcttatcgacaaccaattactagaatagaaattgatgatattcgtggagtaaattcatcaggagctttacagacattgatttggcgaggattaattaaacaagacggcaaaaaagatgctccaggtcatcctaagttgtatgttacaactgattattttttacaatattttaattatcaaagtttggctgatttaccgttaatcgaagactttgaggatacaactgatggtgaggagattgacttattcgattcaaaaggtagcgcagacaaacatttagaaaaagagggatagaaaatggcagaacgattacaaaaagtaattgcggaagcaggaatcgcttcaagaagaaaagctgaaaaaatgattgtagccggtcgagttaaagtagatgggcatgttgttactaagctaggtactaaagtcgatacttttagtaatattacagtcgatgatgagccaattgagcgggaaagcctacacacgtatttgttttataagcctcgtggcgttgtttcgactgcagaagacgatcgtggtagaaaaactgtagttgattatttcgaagatttaccatatcgtttgtatccagtaggaagattagattatgatacgtcaggtttattgctaatgactaacgatggcaaattagcaaatttattgatgcaccctaaaaatgaagtggctaaggtctatgtagccaagattaaagggattttaactcctgatgaaattaaaaccttgactcaaggagtaaagttggatcattttaaggctgcgcctgccaaggtcaaagtattgaaaactgatcataagaaagacacacaaattgtccaaattacaattcatgagggacattatcatcaagttaagcgaatgtttaaagcagtaggtcacttagttgataagcttgctcgtgaaaaatatgcctttttaactctggattcgcttacatcagggcaatatcgggaattatcgaagcatgaagttgacaaattaatgcaattgaactaaattataactgtaattaaatattcaaggttattgtcttcagggcagggtgaaagtcccgaccggcggtgaaagtccgcgacccacgtcagtggttgaatcgttagataccgatagttaaagtctagatggaagaagacaggctaaaaaaacttactacactttttaaggtctgttgctgaagcaatagaccttttgttttggaaaaggaaagtaagttatggatcaagctaaatccaagaatagtagtttaactaatgtgattgcatatgctttaattggctgtattgcttttgtagttatgaaatttgaatttccaatcatgcctggagttgccttcttaaagtttgatttttcagatgtcattattacaattggaatgtttatttttggcattgtaccgggagttattattgctttaattcgaatgttgcttagtttaatttttagtggttttgcattaccaagccttgttggaaatctagcagcattcttagcttcaatgtcatttgcagttccattttatttattaagtaaaaatgtgagtgcggataaccgcaagacaatgatgggcagagttaaaccaatttgtggtttggtaattgggattatcgcaatggcagcagtgatgtcattggctaatgcctccgttttgactcctatttacgcagtaacagcggtaccaaacttgcctactattaatagctatagtgccttgttaagctttactgagaaagtttacttgggtcagttattgcatttaccatcaatgtcaacctacatttttagtattatcatgccctttaacttgttaaaaggattaattaacgctgtggctgtttacttattgtttgaagctaccttgaaaacaattaagccattcgttcgtaagagatttaatttgaattaagttatcatcccatcaattttttaagttgatgggatttttcatattcaaagcatcctaaaatatgctaaaattaatccgttaagtgaatggaggaatttttgatggataaaaagtcaaccgggccatatcagcactatgaacgacctactgaaaagcgaagctcacaagatagtcagcctagtggatcagcacgttggatagcagttattataattttagcggttattttaattgcacttatcccagttgttcatcgtttggcttcaagccattcagaaaaagctgaagaagttcaaacagttaagaaggtttcttctaaatcatccaagtctgttaagactaagaaaacctcatcatcttcttttagcaagaaaaagtctgaaaaggctagttcaagctcatctagtagttctgctactcctaagacttatttagtccaaagtggagatactttaaatgaaattgcagaaaagaatggcttgactgttgatgaattagccagattaaataatcttaaagactcttcaaatattgaagcaggtcagacacttaagttgaaataatctttcagaaaggataaaaggggtcgatgataagatctcttttttattagaatgcaagtagcagtagatggtcctgcatcagcaggtaaaagtacagttgctaaaatcattgcaagtaaattatcctttgtctatatagacacaggggcaatgtatcgtgcatgtacagtgattgctcgtaatcataacttagattatggtgatgaagcgggtatcttgaatgccattgatgaagatggaattgaattgaaatctgaaaatggtgagcaaaaagtatatgtagctggaaaggacgtttctaaagaaattagaacgcctgaaatttcagctaatgtttcggaagtatccgctttgccgaaagtacgagaaaaaatggtaagtctgcaacgtgaaatggcaggcaagacaaatgtcattatggatggtcgcgatattggtacgactgttttacctaacgctgaagttaagatctttttagttgcttcagcaagatcacgtgctgaacgtcgtttattagattttaaagagcgtggtattaaatctgaccaaacagttgatgaaattgaaaaagatattgcagcaagagattataaagattctcaccgcaaaatttcaccgctaaaaaaggcagatgatgcaattgaaattgacaccacaaacatgtcgattgacgaagttgtagaggcaattttagctcaaatcgaaaaaaaacaaaaaaattagaaaaaatagcacaaaatagtagaaaaatatctcggtttcctataaaatgggacatgatattgggaggtacatatgtcagaaaacagtaatcaatttttagacgcattaaagcaaatgcaaggaattgaggtcggagatattgtcgatgtcgaagtattagacattgaagacggccaaatcgatgttggtgttgaaaacgctggtgttgaaggtgtcattactcgtcgtgaatacacttcagaccgtaacgcagacttacgtgatttagttaagcctggtgacaagtttaaggccttagtattaagaagagccggtggcgacaaggaaaatggtgaattcttcttctcagttacccgcttaaaggaaagagaagcctacgacaagttacaaaaagacttcgaagacggaaatgctgtcgaaggtactgtaacttcatcagttcgtggtggtttaattgttgatgttggtacacgtggtttcttaccagcctcattaatttcaaaccgttacgtttcagatcttaagccttatattggtaagactatgaaacttaagattaccgaaattgatcctaacaagaaccgcttaatcctttcacacaaggatttagttgaagaagaacgtgaagaagcatttgacaaggttgcatcacaattagttgttggtgacgttgttgaaggtaaggtttcacgtttgactaacttcggtgcattcatcgatgttggtggtgttgacggtttagttcatatttcagaaatttcttacaagcatgttgacaagccaagcgatgttttaaaggttggtcaagatgttaaggttaaggtcattggtatcgacaatgacagacatcgtatttccctgtctattaagcaaactgaaccttctccatttgaacaagctacagctgacttaaacgaaggcgatatttttgaaggcgaagtaaagtcattaactaactttggtgctttcgttgaagtcgctgatggtattcaaggtttggtacacgtttcagaaatctcaaacaagcatgttgacaagccaagcgatgttttaaaggttggtcaaagtgttaaggttaaggttttgaacattgacccaagtgatagaagaatctcactttcaatcaaggctgctgactcaaatgcttcttcagaaaatcataattctcgtccacgtcgttcacgtaacgaaaattcagtaaacaagaagtacatgagtgataacgacaacggctttgcattaggtgacatcattggtgaccaattaaaggaccgtaagtagtcattttataaaaaagccgacttgagtcggcttttttatttatgtttagattagtaaaggagggcgagaaatggttttaccagttgttgcaattgttggtcaacccaatgttggtaaatcaacacttttcaatagaataattaatcaacgtttagctattgttgaggacaaacctggtgttacccgagatcgtaattatgctcaagccgaatggatggggcataagtttgatttgatcgatactggtggtattacctgggaaggtggcaagatcgaggaagaaatcagagctcaagcagaaattgcaattgaagaagcagatgttatcgtgatgttaaccaatgtggtaaatcacgtgacagatttagacgaaagaatagctcatcttctttaccgtactaaaaagccagttattttagctgtaaataaagctgataatcctgaacagcgaagcgatatttatgatttctatagtttaggattgggggatccgattcctgtttcaagtagtcatggtactggtattggtgatttgcttgatcagattgttaatgattttcctgacgataaagatactgaagctgatgatgttatttcttttagcgttattggtcgaccaaatgtaggtaagtcttcaattgttaacaaattacttggtgaagatcgggtaattgttgctaatgaagaaggaacaactcgtgatgctgtcgatacgccgtttacccatgatggtgtaaaatttaaggtcgttgatactgccggaatcagaagacgaggcaaagtgtatgagaagacagaaaagtactctgtaatgcgcgctatgagtgctattgagcgctcagacgtggttttccttgtcctcgatgcaagtacaggcattagagaacaagacaagcatgtggctggatatgctcacgaggcgggtcgtggaatcatcattgtcgttaacaaatgggatttgccaaaaaagaatagtacaagcgctaaagaatttgaacgtgaaattagagatgaatttcaatatttggactatgctcctattctttttgtttctgccaagacaggtcaaagattagatcaaattcctaatatggttaaagaagtctatgataatcaaaatcaaagaattcaatctagtgtcttaaatgacttgttgcttgaagcaagtaagttagttccaactccaatggtgaagggtaagagattgcgtgtttattacatgacccaagtaagtacgaatccaccgacttttgttgtatttgtgaatgacccagaactgatgcacttctcatatgaacgatttttgattaatcaattacgacaaaactttgattttactggtacaccaatcaagattttaccacgtaaacgtaaataaaagataagcaaaatatcacaaagaccttgttgttataaggcttttgtgatatttttgtttttaggaaacatgattagttgtgatcatttttccttgtttagcttaaacaaagaaaaattttttgaacattaggttcaaattcaggaggtgaattattcatggcaaataaggctgaattagtttcagaagttgcttcaaaaactaagttaactaagaagcaagttgcaaatactgttgatgctatccttgattcaattcaagaaaaccttgctaagggtgaaaaggtacaattaatcggttttggtacttttgaagtacgtcaccgtgctgctcgtaagggccgtaacccacaaactggtgatgaaatcgaaatcccagctagtgaagtacctgcatttaagccaggtaaagctcttaaggatgccgttaagtaatagcttaactaatgtgataggacgttggactttgttccggcgtctttttttagtacaatggtaacttgattggaggtattatgagttattctgaacaattactagatgcaattcaaaatcatgatttttcacaaaacaaacaccttttaaaagaagctttagataatgatgatcccgaggtcttgtcatctttagcagaaaacctaactggcttaggttttacagatttagcaaaagaaatatatcgagctttaatagctaaatttcctaaagaagatttatttaaagtttacttggcagagattatgttaaatgatggcgatgatgacgatggtctgtcgcttttatataatgtccctgagagctcttcagcttatttagatagtctattagtacaagctgattattaccaaactaacggcttaatagaaacagctaaggacaaattaatacgagcactacaattagctccagaagaagatgctattaaatttggtttagcagagattgaatatttaagtggtaattatgaacaagcacttgagttatatcaagatttaatcaaacgtcaaagtacttttagtgaagtaaatctgtaccaaagattatttgcgacttttgccaaattaggtaattatgaagaagctgccaaagttattcgtaaacatgcaaatagtattttagatattgattctaagtatgaagcaggattagttctcttatctgtaggtgatgataagcaggcaattaagttcttagatgaagtgattgagcaaagtcctgactatgtaaatgcgtatccattattagcacaagcttatgatcatcagcatgacaatgaacaagtattgaggactgctcaagcaggattagcgtacaatgaactggatgaaacactttattcaatgggagcacgtgcagcagctaatttgaatgaattggatacagctcgtgacttacttgaaaaggggttaaaagtagcgccagacaatagtgatttacgtatgcagctatctaacctatatgttcatgaacaccaggctaaggagaatattgccttatttagtaacttagatgaggaaagcgtggagccacaggcacattggaatatggcattatcatatgaggatttggatgatattcagaaagcacagagcgaatttttactagcttatccggatttcaaggataatccagactttttgcgccaaatgataatcttttttaatgtacaaaataatgatgaaataacaaaacaactgctagaaagatatcttaagttagctccagaagatgatgaaatgcaggatctttataataatctgtaaaaaaataccacgaagtttttgcttcgtggttttattatttctaaaaaataggtgccaacagacgtgaaaagtattgtttaaacttaagccatttagattgctgattaaagtattcattagttagaagactgcaactagctaggtccttttcaaaaatttgtttaagttcttgagttaattgaatattgtaattaaaagcgttaacctcgaagtttaaggtataacttctgaagtcttgattggctgaaccaacagatgagatattggagccagaaaccattgttttggcatggatgaagccatcattatatttgtaaattttaacgccatgagcaactaaatattttgcataatattcggtagctcggtaaacaaagggatgatctggcatgcaagggatcatgatgcgtacatcaacaccgctattagcagcaataattaatgcttctaaaatggattcttcaggaattaaatagggtgtttgaatatagatatagtttttagccccagcaatgatgccctcatatcctcggcgaatgccataatgttggttatcgggacctgaagaaacgatttgcattgctacgttatcatcgttgtcaagatctttacgttcgacagtaaaagcatgtaattcgcttagatcaaatttaggtaatgcagttcgtctgatagaagtattccaatccatggcaaagcgtgtctccattaggataggtgattgacccacaacacgtaaatgtgtatcgcgccaatgaccaaattttttagattgattaacgtactgatcaccgatgttaaagccaccaatatagccaatatgatggtcgattacgattaatttgcggtgtaaatgataatttagtcgtggtgtagtaaaccaatgctttttagaagtagaaatgaaaggctgtgcttcgccaccaagctctcttaaatgattaaaaaaagcaggtttagtaccacgtgagccagagacatcataaataactctgacttttactcctttagcagaagcctcttctaaggcccgtaagacacgctttcctagattatcattataaaaagtgtagaactctaaactaatcgatgttttagcttgcttaagatcagcaattatttggtcaaacaactcgggtccactggtgaaaaccttaactttattggcaaaagttaaaatagcatcatcgttgtttaaattcagctctgataacatgcgggcacgtggtttgcgctttttttcgggtaaaagatcatgttctgccaacatagctttttgtttttttagataacgattacgcgtctctttttgagcactttgaatagcaaaaatttcgtcactaagtgtataattttttacggtaagttgaataaataattaaaaaagcccaagtcctttgaatttggacttgagctcaaacaaaaagaccagtagtctgatgttaagaacaaaaaacacattagaagctggtcttttatgaattcaattgtaactgaaatcgcaaatattataaagtctgaagataattatattaagcgtgaaagaaaaataatctgtttcttcttaaacctgattaaggaaatcatggccttggctttagctaaagttgatgatgaaatgattaccaaggttaaagcacagggctatcagattgataagaagaatgagcgctcaatcaatatggcttttggcgaagttaggtatgtcagaagaagatatgtctgcccaggcaaacaagcaaggtatcccttggatgaattaatgggctttgacaaatacaagcgctacagtattttagcagtcaaaaacatcttagaagtaagcagcgttgccacttatcgcaatactgctctagcagtcaattgcctgtctggctttaatattagccatatgcaggtgggcaatttggtaaaaatggccgggaaaaatattaaagcgggccaagaagcagattcaagatatgatgccgcaggcgagactgtaaaatagtttgtgtaaggatgaatgattccttaaatttatttctttaaacattagaaaaaggggttcctttctcgtatgattggtttgaacaaaaaaacacatacagaaagaagaactccttcatgaatgattttaccaaagattttgctcaagctctattcaatccagacaaaataaatgatttattgcgcaaagagctacaacaggctgttaataacttgttagaagctgaattgactgcctttctgggctatgatccctatgccagaaatggctggaatactggcaactctagaaatggtgcttatttccgcaaagttgatacgcaatttggcccaattgaagtgcaagtgcctcgggatcgcaacggtcagtttcatcagcacacgctgcctggctacaagcagcactcggatatcttggaaagcatgattatcaagctttactccaagggcgtgaccaccagggaaatagccgatctaattgaaaagatgtatggcagccattacagtccagctcaggtatcaaatatttccaagcagatgattccaaaggttgaggcttaccacaaacgcaagctaagcgacaagtttttctgcgtctatttggatgcgacataccttcctttgcgccgagaaacatttgagcgtgaagcagtctatattgccattggcatcaagcctaatgggcacaaggaggtcattgactactgcattgcacctagcgagaacattgaagtctggacagatatgcttcaaaacatgaaatcccgaggcttaaagcaagttgagctttttctttctgatggtgttgttggcatgaaaacagccttggccaggacttatcctaaagctcattttcaacgctgtttggttcatgtcatgcgcaatatctgcgctaaagtacgcgtcgacgatcgtgaaaagatcatgaacgaattcaaacaggtgcatcaacagacaaacaaagaagaagccacagctgtcctgcatgacttctataccaaatggggcaaggtttacagccatgttatcagaagcttgaaagacatagaaccagatctgctggtcttttataactatcccaagcagatcagagcttcaatttattcgactaacatgattgaatcatttaacaatgtgatcaagcgcaaagctaagcctaaggcagagtttccaactgaacagtcgcttgatgcttttattggcattcaggcaatgagctacaatgaccgttatttcaatcgaattcataaaggctttggtcaggttcaggacaccttagaatcctactttgattaaataaataattaaaaaatcaatttacgagaaagatctatttacacaaaagatttgacagtttccgaaatgtgtcatactgcttttgttttacataaatttctaactaaaaataaagaaatcgaattagttcttccagagacttggcaagcaaaagacttatttgatcaacttcaaaaaaatcttactgagttttctaaatggttagtttgggccaacaaaattgattctgttcaaaaagaagccgattcaattaaaatgtttcaacaaaaaatggttgatggtacagcattcaacctagttattttagttgatggacagccagctggcatgattgacttacataatttgaatcatgaatctggcgaagtaggatattggctttctaatgattttcaacatttaggaattatgactgaatctgtcgaatttcttaagaaatacgcatttgaacagttgaagcttgattatttgattttaagaactcatcctaagaattccgctagtcagaatgtagctaagcgaagtagtttcgtgtatttaaaagatgatgaaaatgggcataaggtatttgtgctaagaaataattaaaatataacgacttcaaagttttaataaagggagaaatttatgcaaagaagcgatattgaaactgaattaggcaagattaattttgcctatcgaaagggagatccattagttgtttttttgaatggctttggtagttttgatacagcacaatctttttcaaaagtaattgaagctttgcccaataagtatggctattttgcatcagattatttgaatagtggctttagtggcaagtctttaaaggactatacagtatcagacgaagctactaaattagctaaaattattaacgattttaatgcaaaaaaagttataattttggctcatagcattggcggtgtgtatgctatgcaaatgaaagataaaatcaataatttgaaggcttttgtaggaattgagccaactactagagaaatcatgttaaatcctccaaaggaaccagcttatattgagaaaaataaaaacatggcaaaacttcaagaaaaaattgaagctgatcttagagaaatttttactccagaagaaaataaaaagttttggacaactacagagcaaaatgcgaagaaatttgatgaaaaggataatttaaacgcacaagcagcctacgaaaatgattcgttttggaaaaatactaccaggataagtgataaaacaccaagtattgttattacagaaaagtatcgtgaaaatgaatataagcggtcagaatacacttcaaataatcctaaatctaaagttataacattaggcgaatctcactatatacattttgaatatccaaaacaaattgcaggaaactgtcaaatcttttgtgtaaatagttctttctcgtaaattgattttttaatcatttatttaatcaaaataggattctaaggtatcctgaacctgaccaaagcctttatgaattcggttgaaatagcggtcattgtagctcattgcctggatgccaataaatacatcaagcgactgttcagttggaaattctgccttaggcttagctttacgcttgatgacgttgttaaaggattcaatcatgttggttgaataaattgaagctctgatttgtttgggataattgtagaagaccagcagatcgggctcaatttccctcaaacctttgataacatggctataagctttattccattttgcataaaattcatgcaagacagctgcagcttctttttggcttgtctgttgatgtatctgcttgaattcgttcatgatcttttcgcggtcatccacccggactttagcacagatattgcgcatgacatgaaccaagcagcgttgaaaatgagctttaggataagtcctggtcaaggccgctttcatgccaacaacaccatcagaaagaaagagctcaacttgcttcaagcctctggacttcatgttttgaagcatctctgtccagacttcaatgttctcactaggcgcaatgcagtagtcaatgacttctttatgtccattaggtttaatgccaatggcaatatagactgcttcacgctcaaacgtttctcggcgcaaaggaaggtatgtcgcatccaaatagacacagaaaaacttgtcgcttagcttgcgcttgtgataagcctcaaccttggggagcatctgcttggaaatatttgatacttgggctggactataatgactgccatacattttctcaatcaagtcagcgatttctctggtagttacgcctttggagtagagcttgataatcgtgctttccaaaacatcagagtgctgcttgtagtcaggcagcgtgtgctgatgaaactggccgttgcgatctcgaggcacttgcacttcaattggtccaaactgggtatcaaccttgcggaaataagcaccatttctagaattgccagtattccagccatttctggcatagggatcatagcccagaaaggcagtcaattcagcttctagcaagttattaacagcctgttgtagctctttgcgcaataaatcgtttattttgtcttgattgaatagagcttgtgctatattttttgtaaaatcattcatgaaggagttcttctttctgtatgtgtttttttgttcaaaccaatcatacgagaaaggaactcctttttctaatgtttaaagaaataaatttaaggaattattcatccttacacaaaatattttacagtctcttcgattttatttagtaaaatttctacttcctttaattcaaaagggattactttgttgaatactggaagtatgattggagcatttatattaagtggtactctaaaaaataaatatttactgctttgcctttttctattaattgaactattgatgggaatgatgtcgggacaaatttcagctactagtaatgaagccatttatggagaaagcaataagtcgactatgctttcaactgtttcatttattgcagagatcttggttagtatttcattatttataagcaatagtattatgaaagtatttggagacttaaaagtaatgtttttttgtatccgcagtgtattttggtgttgttttgctaacaataccattaataaaggagaaagataccagataaatcatggtaaccgatcataaaaacattgaagtattgcgatagaaacgaaattactgttttgggcaaattaacatctgatttgaggttatagtcatgattacaattgaagcgctgcataattttccgaaaatagagagaaagtgcaacttaagtgcagaaataattaggacaatcaaaaatgaaggatttaatatacgcgataatgatgttttatgtattgcttctaaattgatttctaaatctgaaggtctgtttgttcacttaaattctattaatccaagtcaattagccttacgtttgcatcagcaaatacctagaaaagctccaagactaattcagattataattgatcaaaccgaagataagagtggtaagaaactaaagatatctaagaactttattggtgggtggttgccgaatggtttgtttttaactagtgcaggtgtagataaaattgatgctggtactgcaatagttttacctaaaaattgtgatgaaattgctaagagaattagtgatgatatttttgatcaattaaaagtcagagtagctatcataattaccgatagtgatggaagaattgataaaaaaggtgcaactcaagtagcaattggattgtatggtgtttctggtttaagaaaaagtcagtatcaagataaaactaatgttgaaactatctgtgacatgctagccgcttctgcaggattattgatgggacaaaaagggaaaatgctgcctattgttaaaattcatggtatagattataatagattatacatttgataagtttgcaacaattagagatgcagtgaattaattttaagaaagtgaagatttctatgatgacatcaaaattaattataattcgaggaaactctggcagtggcaaaactacactgtctaaagaaatccatcgtcgattgccacacaatacactattgattccacaagatacagttagaagagaaatgctgaatgttaaagacggagaaaagacatttgctttgccattattagaaaacttgcttgagtatggttatcatcactgttcttacactattttagaaggtatcttgaatgcgaaatggtatgctgatttattcaaaaaatctcagcagctttttggtgatcaaatttatgcctattattttgatattccgtttgaagaaacaatgaaacgccataaaactcgtcatgaacattcttttggtgaagaaacaatgcgctcatggtggaatgaaaaagattatcttggttttattcccgagtatgcttttactagtcagattaatttagacgatgaagttgaaattgtgatgaatgatattcaagtagaggactagcgatggttaaaaactatattaagaccttacgccaaaaagttggtcatgaaccaattattctaaattttgctggtggaattttggctaatagcaagaatgaaatcttacttcaaaaaagatcagattttaatgcatggggcttacctggtggtgctttagaatttggagaatcagctccaaaagcatgcgttcgagaatttttagaagaaactggcttaaaagtaagaactaagtcactattaggcgtttcaactaattttatccagcattatcctaatcaagatgtggcacaggcagtaactgttgaattagtagaaaaaatgtcaaaagagattagctctgaaactcttgatctgaagtatttttctaaagataaattatccaagatttttaacaagcaacatcaaatttttattgatcattactttaatgaagactatccatttattgattaagggagaatatatatgaatacgcgtggtgctagttaaatcgttttagttaataaaaaagtccaatcttgttagactcgacttgtaaatagtaataatagaaaagagtctgatctgattgaactgccttaagcttaagcgttttagccaccatttacaagttagttttaaagatttagtgataatttgtcggcactggtatcgtttgtatgcaccggctgagtttactcatcggcgaaatattgatcaaattaaaactacggacagtctgattttggctttacttatctggcaagctaagacaggaattgaatcacaaagaagattctgtgaatgtttcaattgtttatcacactcacgttttaatcggcgttcacgtcagctattgcaattgatttatcagatacggcaagaaatgaataaaaaggttgacctgaatggacagttcttgatcattgacagctttccggtacctgtttgccaaccaattcgaaactatcgtgctaaaatttttcgcggttatgccaacattggttataaggccaccaagaaaatttacttctatggtttcaaagttcatgccattgttagcgatgacggttacattcttgattatgtcgtaacaaaggcatcagttcatgatgccagggagacagttgaactgatagaaaatacccatccatctaattactatcttcttggcgacgaaggctatttaggcaaagaactgcatcaacagctaaaacaaatgggttacgaactttggacaccatatcgtaaaaatatgacaggagctaaaaagcacaatgatcatcaattgatggctattcgcagaacaattgaaagcgacttttcgcttctgacctattacaatgccgagaacaatcgagcacgtagtctgataggctttcaaagccggttggaaattgcaattttagcttataatttggcttattgtctagaacgatttaactagcaccacgcgtatatgaatgaaggatcatttgttttagatattgatttaagtaaaaaagctgtaatagaacctggagtcgaaaatttagagtataagtttcatgaaaaattgctttttgcatttgtcccagatgatgaaattaactcgtttttagataaacactctcataagactctgggcaaatttaaaactgtttcgtttagacctaaaatatatgaagtggaagtcaataatcaactaattacgttatgtcaagctccagtgggagcaccagcttcaacaaagtttttagactggttgatcaattatggagttaaacaagttttatctgttggaaacgcaggagctttggataatctacctgaaaacacgatgtttgtccctcaagaagcgattcgcggagaggggacatctttttactacaaagaaccaagtaagattattgcattagataaaaattttgtaagaagagttgagaatgaaataaaaaatttaggtttccaatatgaagagggaacaacttggacaacagatggattttttagagaaacacctaatcaagttttgcaagctaaaaaactaggtgcaaaaactgtagaaatggagtgctcagctttagctgcttgtgcagaatttagaaatataagttttgcacaaattttgtttactgccgatagtttagctgatatggataactatgataaacgtaactggggccatgattcatatagcgttagcttgaatattggatctcaggtattagcgagtttatgataatatttcaactaaaaatggagtgtaaaatatgaacaaacaaccattcattttagactttgacaaacatcctcatgcggttcttgaaccaaatcacgatcaagaaccatttcattttcatccaagattgctttacgcattcgtgccggaaaaagaaattaatgcatttttagatcaccattttcaccgtactttaggtgaatttgagtcatgttcttttaatcctaaaatttatgaagttcaaattaataacgaatttttcactttgtgtcaagcgcccttgggagcaccggcagctgtacagttgcttgaatggctaattgcttatggagtagaaaaggtgttaaccattggaacagcaggtgccttagtagatttacctgaaaatgcgatgctacttccaacacgtgcaattcgagatgaagggacatcttttcactatatgaatcctggacaacttgtggaactagattctatatttttgaaggaagtagaaaagattttagttgagctaaatatagaatatgacgagataacgacttggacaacagatggtttctttagagaaacgcctaaaaaagtggcacaatttcgtcagttaggcgcgtcaactgtagaaatggaatgtgcagctttagcagcatgtgctcagtttagaaagattgattttgcacaatttcttttcactgcagatactttagctgatatggataattatgatgaacgtgattggggcggtaaatcgcatagtgtaggtttaaatataggtgcaaaggttttaacaaagattaaataaagaaaaaggaagaagttgaaagtgacttcttccttttattattaaattgaatgattattgtctttttttataaaccattttctagcaaaatcaattagcggttttacatttattgctttgatgacaccattgtttaacttaacctttttgatagcagagggatgctttgcttcaaactctgtccctaattcattaaagtcatcatatgaatccatatcaatattttgatattcagtccaaatagttttgccgctttcatccagactagttgcagcagaacatgtttcggtttttctaccaattgtggattctgcatagtgcaaaactgtacacgtttcataatcagtgcctaaaaagatagttttgccattattctggtacaaataatctaaaggactgtcaattccataaggaatatttaaaggttgattctgtgcaatctttactttgtttttgccccaaatagcaattggcaagtaaggatgggtacttcgaacaacatctggcaaagttctgaaatactctggcgtaacccctaagccttctgtcattgatgttgtaggattataaggtggcatagcatccttaactacttgaatcaaagatttttgtactggtggatattcccaagtggctggatcacaattcgtagaaacttgtgagggcatcattattgttccattaggcacagcttcttttaaggcttcgacaatggtttctggaccattaggaacgtaatagaatttacttagtgcagtatgaactaatacggtatcatcatctttaatacccgcatttcttaatgcactcttaaaatcattttttgttgtgactgtgttaattatctcttcagacatatggttttccttttatgttaacttgaatttttttactggcttggtctgaagtgagatactctagttttaatttcggtattatttattttagctttctgattactcatttgttgttgctcttttctaatactaatctatctaacagtttagcactaaatattattaagaggagatgggctttcataatgtataagttgaaaaatagatttaaaagcagactaaaaagtcttaattgatcaaaaaataagggcgatattggatagtcatcgagactgtaaaatagtttgtgtaaggatgaatgattccttaaatttatttctttaaacattagaaaaaggagttcctttctcgtatgattggtttgaacaaaaaaacacatacagaaagaagaactccttcatgaatgattttaccaaagattttgctcaagctctattcaatccagacaaaataaatgatttattgcgcaaagaactacaacaggctgttaataacttgctagaagctgaattgactgcctttctgggctatgatccctatgccagaaatggctggaatactggcaactctagaaatggtgcttatttccgcaaagttgatacgcaatttggcccaattgaagtgcaagtgcctcgggatcgcaacggtcaatttcatcagcacacgctgcctgactacaagcagcactcggatatcttggaaagcatgattatcaagctttactccaatggcgtgaccaccagggaaatagccgatctaattgaaaagatgtatggcagccattacagtccagctcaggtatcaaatatttccaagcagatgattccaaaggttgaggcttaccacaaacgcaagctaagcgacaagtttttctgcgtctatttggatgcgacataccttcctttgcgccgagaaacgtttgagcgtgaagcagtctatattgccattggcattaaacctaatggacataaggaagtcattgactactgcattgctcctagtgagaacattgaagtctggacagagatgcttcaaaacatgaagtccagaggcttgaagcaagttgaactctttctttctgatggtgttgttggcatgaaaacagccttggccaggacttatcctaaagctcattttcaacgctgtttggttcatgtcatgcgcaatatctgcgctaaagtacgcgtcgacgatcgtgaaaagatcatgaacgaattcaaacaggtgcatcaacagacaaacaaaaaagaagctgcagctgtcttgcacaaattctatgccaaatggaataaagcttatagccatgtcatcaaaggtttgaaggaaattgagcccgatctgctagtcttctacaattatcccaaacaaatcagagcttcaatttattcaaccaatatgattgaatcctttaacaacgtcatcaagcgtaaagctaagcctaaggcagaatttccaactgaacagtcgcttgatgcatttattggcatccaggcaatgagctacaatgaccgttatttcaatcgaattcataaaggctttggtcaggttcaggacaccttagaatcctactttgattaaataaataattaaaaaatcaatttacgagaaagaactatttacacaaaagatttgacagtttctagtcatcgtccttataacttgaaaattatttattacgcatttttgacaaatacttttgatgcttttcttcatctttttcaatgaagaagtaagctactgcggctaatacccctacgactattccgaccaaaatagttttccaagtgaaattggttaccatgtagcatgaaataattaatgccaaagctggaataacatagccgaatgggagcttaaaaccgttatttggaaattcattagtatgcttgaatttgattactgctaagatagatggtacatattgaataaatgaagccaatacaatgcaagataccaagaagaggtatgattgtgtgattaaaatcatagtgatgattgcactgagtaaaatagctacccaagcagcatcatgcttgttcttttttccaatccatttaggtaacattgcgtgctcattagcaagagaagcaatcaacgatggagtattgaaagatcctgcaaaagcaacgccgataacactaatcagcatccctgcaatcactagaacgtagccccaatcaccaacggccttttgaaaggctacagcaataggcgtactgtaattaaccatcttggatcctaaaatcccgatagctactaacatcattaatgcatataaaatagtcacagtgatcatcactgagatcaatactttgggaatatttttctctggattattcatctgttttggggcaatcggaataaaggagaatccagtaaacatgtaaaatactacactaaatgcagcaccaaaatgtttgaagtaaggaccaacacctagggttgctgctttaggaatcacaggtgtaaagttcattttatgaataaaaaaggcaccaatgatgataaaaatcagaatagtaatcattttggcagcagaggataagttatcgactaattttacaattgtccgaccaaataagttaataatcgtaaacagcacaattagcacaattattccaatagctatcccgtagtgaacagcgtgattactaaaaacaggggacaaagtctttaaaatagttaacaaagctactatttctgccgcatatgtacagcatcctaaaaaccaagtatatattccaagttcgtagccagtaaatcgcccaaaggcgtgatatgaataaagccaagctgcgcctgatccagtaaaacgacttgacaagtcagcataacaaagagtaaccatacttactgtaagagcagcacaaattgttatgaaaacactcatcaagttcatatctttatagattgtttgaggtattaaaaaggcaccggacccaattaccccattaattcccaagaagtaaatagacatgaacgaaagcttcttgggagtaactgttttttggcattgttttcatcctcttgattgcttgatattgacaaacgcttacaagctaagattagttcttgccatgaaagattgcaaagaataagtgttatccatcccataaataaaaatagagaaaagtgtataacctctgcattttttgttaaaatataggtaagaagattaagtaatgattaggggatgagatcatgatgaacaaaaaaattatgtatatggcaggagtagtcttagcctccttaagtttaggtgcgatgactgctcagacagttaacgcagctacaactaatccaattcgtcagggtaaaaagttaaacttgactagaaaagcaacgatttttaaccgtaaaggagaaaaagttggacatttaaaaaagggccgtgtttacaagatcctaggcattaaatcaattaatggcaataattttgtgaagattggtaagaataaattcgttaaggaaggggcatttttaccatacattaaggacacagccgagacaattaaccgcattaagcatccatcatatgtttatgataaaaatggtcagccaattccaggtaagtttgttaaacaaggctctaaagttaaaaatcttggccataaagaaattgatgaacggccattcattcaaattggagaaaacgaatacgttaaagctaataacgtattgactgtaattattaattattagtaaaagaaaagctatatcatgaaatgcatcatggtatagctttttacttgtggatgaaaaagcgatgtggttttttataagtaaatccttctcccattgcctcatttacctcaattattgaaacaaaagcatgtggatcttcttgcttgattaaagctttgattgatggaatttcccgcggtgcgactacaacataaattacacgtttttcattttgttgatagccacctaaagcttttagatatgtgaaaccacgatttagttttaaatcaatcatcttgccaatttgttcatatttgtcagagataattaataaaccacgggctgtgtatgcaccttgctgaacggtatccattactcgggataagacaaaagaagctaataatgtgtatagcatatgcttgatgtctaggtaagatagggatgcgaagagtactattgcatcacaagctaaaagcattttgccagacgaaataccaaattttatctgacagattcgggcaataatatcagttccaccggaagtaccattatatctaaatactaaccctaatccgattccagacaataacccagcagaaattgctgaaaggaagaggtcgtgttctaaatctaattgttttataataggtactgaatgccaaaaccataagaaaaaggaaagactgagcgttccccagattgtataggctaaaagacgtttgcccataaagcgatagcctaacaaaattagtggaatattcaatacaagggtcgatagtcccatgttgatgccccaaaaatgccgcagaagaagtgaaataccacttagtccgccgtcggctagtttattggggacagaaatcatgtctagacttaaagcggaaatagcacagcctagcgcgatcatgaggatatcaattaagatacttttgtcaatcttacgcataatgattacctcctttatgtctttcctcaattttaacaaagtgtatagcaaaagtaataataaagacaataagaattgagattttaatatgataaagatagataatttaccagaaatttttaccaaggcaatgcccgtgttacagatattagaaaatgcaggctttgaagcgtactttgtgggtggttctgtccgcgatgttttgttacatcgtcatgttcatgatgtagacattactactagtgcttatccagaagaggtaaaagagttatttgataagtcaattgatacaggaattaaacatggaacggtgactgtcctttatggtggtgaaagttatgagattaccacttttagaacagaatcgggttatcaagattttcgtcgtccagatcatgtaacatttgttcaaaacttagatgaagatttaaagcgtagagactttacgattaacgctctggcaatggatacacgagggcaaattgttgacttatttaacggactagatgatctcaaaaaccatgtcattcgtgctgtaggtgatccagaaaaaagatttcacgaggatgctttgcgaatgatgcgggccgtacgttttatgagtcaacttgaatttaagttagaaagcaagacccaacaggcaattaaggataatcataaattacttaaaaaaatttcagttgaacgaattcgagaagaatttgtaaaattaggtttaggaccacatgctcggcaagcttttcaggtttttcttgatacaaatttgagtgaagatgtacctgattttttgggaaaaaaagatcaactagctattttcccacagttaaaattcagtccaacgatggaaaatagtttgtggtcactgataattttgctattgaaattaccgaatgaacaaattcatcgttttatgcgtgactggaaaaactctaatgctatgactgagcaagtcgaaagaattattaatctatttgatttactttctagtcatgctcctagtgattatgaattattcttagcaggggaagagacattaattaatacgattgacgttgctcatattgttggtcaaccaatttcttcagaagctttagttgatcgttatatggctttacctattaaaaaagcgtcggaactagccgttgatgggagatttttaatagatcgcgggatgcgaccaggtgcaaaattggggcagactttgaataaaattcgagagttagttgtttcaggtgaagttgagaataatcaagaagcgattgaaagctatttgactacaattgaatagaaagaaaaatgtagcagaattcaactgctacattttttaaacataaagtaaaacggaaaagtacattaagattgaaccgagcataacaaataaatgccagatagtatggataaagggaacattgcgcatactgaacagaatcgcgccgattgtgtaagcaatgccaccactaactaatagccagaatccagttggacttaagcgaacatataaataagatcctgacaagataactaaccatcccattgcaacatagaggattgtatcaagtatgacgtgtttaccacgattgaagatgtagtaaatgatgccaaagatggttaggccccagatcaagccaaataaagtccaaccccaggctccaccaattgcaacaagtgaatatggagtataagatcctgcaatcaaaagaaagattgaggaatggtcaaaaatttgaaaaatatttttggcccgtgtaaaaactaaactgtgatatagtgtggaaaataaataaagcagtaccaggcaagagccataaattgtgaaagtaacaactcgcatcgggctgcctgtatgagctgcctttacaattaaaattactaagccggtaactgctagtccgaaaccaatcccatgagttatggcactaaaaatattatctagaaggtagtacctttctgatcgttgttctggttgctgccaaagtttgctaattttcatgaagtgtaatcaatccttttttcttctaatagttttttgatacaatacagtatatatgttgcttacattttatcataaatcgggtaaacaaattagaattgaaggcgaatacgttgtcgaagataaaagttatgacggactcttccgtccaattaacaccagaagaagttgaaaaatatgacattacagtagtcccattgacgattaccatcgacggtaagtcatatgtggatgggattgatatcactagaagtgattttgtcaagaagatgaatgaagcggagagcttacctaagactagtcagccaccaattggccgttttgttgatgtgattaaaaaattaaccgcagatggcagtcaagtgattggtattttcttagctaaatcattaagtggtacgatagatgccgctcgtcaagctgcagaaattgcaggtcaaagcgataatgttacaattattgactctgaactaaccgacagggcagaaggcttccaagttttggctgctgctaaggatgctcaggctggtaaaagcatggctgagattattgatcatgttaaaaagattcgtagtactcaaaaactggaaatgatggtagttaatttacaaaacttaatcaagggtggccgtttaggtgcactttctggtcgaattgctactatgcttaatattagaatcgctcttcagatgccacaaggtaagttaatcgtagccaaaaaaggacgaggtaagaaatttacacgtgcttttgatgaacgagtgttaaaagaaatcgcagataataaagagcatattaaagaagtaggcatttcgtacgttgatacacctgaattaatggaagaattagctgaaaaaattcgtgcaatcaatcctgcgattaatgttttagtggcagagacaagtccaattatcgcaacacatgctggcaatggtgcttatgcgatcttatattatgtggagtaattatggcttaccgagaaagtttttatcgatatttaatgacgcaaagggatgcagattcagctgatgacgtagctcaatttgcgaataatgcacagcatgacctgacttttcctaagcaagaacaagattatgagaaattgtcagattatttggaattgaatgctagttatttaccaagtatgtcaatttttgatcgtgcttatcgaatgtatgaagacaaaatgatgtattaagcccaagcctgatagatgcctgggcttttttattaagtgggtagaaaaatgcaggtagtaatttttattggttttattgtctttgcggtagcatttgcgacgattattcaacaacgctttttgaagagaatatcagttaattacattgcaatggcgattggagcggctattgcactagtaccacaaactaattcattaattgaggactttagctcggaattatttatgggcttgattgtagcgccattactattttttgagggacaacgtactaggttgtataatgttttacgttcgtggggcgcaatagttgggttaacggttattatgattatcttggcaactataactgcgggattcgggatctattttagtatgggtctctctaccactggcttttattctggctgcaatttcaacgccaacagatgctacagcaacagaatctgtaacacatggattgaagctgcctaagaagattgctttttacctaaaagatgagtctttgtttaatgacgcttcaggtatcattttgcttaatatggcagttgattggtacttgcatcaagaattacggattggacaagcaataggtaattttttatattctgcaggtggaggttttttctaggagctttggtggctactttattagttttcttgcgtcaggaaagttttcgctccaaatatcatttatctgctggtgttgcaatgccggttgatgtcatattctttttgacaccgttaataatatattttttagcagaagaaattcacgtttctggaattattgcagtcgttgcagccggattgattcataacgttgaatctgagcgaagcaggcttactaatgcctttattttttataacagtaatcaattatcgcaacttctgattgatattttaaatgggattgtctttttgcttttgggaatcatcattgttcggtcaatgagggaagacattttaatcaacaaacaattgatgcgattttgatcggaataattttatacctagctaatttgcttattagatacttttattatcgatttagcccttctattaaaggaaaaacgagtaataaagaagcattgatttttagtctgggtggcattcatggagcagttacttttgctttagcatatacgttatatgatttacgtattaatgtagcagatttccatttaattttggtgagtgaaattacgcttattttactaagtatgattgttccaacaattgtttttcacatgatcttggacaaagatatacctgattttgatcaaagaaaggaagttgatcgagttcgtgtggcaatgattgagtatgctatggatcaaatgaaaaagatctatttacctaaaaagattcgaaaacaattaaaattcgatttaagggcacaaatgaatcaaacttctatggttgattttgctagggaaataaagtatacaattaaacaaaaagaattacccgatgatcagaaagaatttagagctgaggtatatagatatgcttttagacaagaacgtgactatttaggtaaaattgcacaacaagagagaaaatatcgtcgaggctttctggctttatatagacagattttgatgtcagaagtggtgttcttagatgatgaaaatgattaattttagaaagaagagataatatggcaacaattcaatggtatccggggcatatgaacaaggctcgtaatcaactggaagataagttaggactgattgatgttttggtggaagtacttgatgcccgaattccgcaagcttcaagaaatccaatgattgaaggactagttggtaataaaccacatattattatcttaaataaggctgatttagctgatccagttttaacaaaggcatgggcagcagaattagctggagataataagtatgttttggcacttgactccttgcacaatactaatatgcagaagttggtttccttagtaaaaaaggcggcagctgccaaaacagagaagctagaagcacgaggggcctcaaatcctactattagaattgctttggcaggtattcctaactgtggcaagtcaacggtgattaatcgtttagttggtcggaacgtggctgaagtcggtaacaaaccaggtgtaactaagggacaaagatggctgaaaacaaatgctaatattcaagtgctcgatacaccagggattttatggcctaaattttctgatcaggaagttggttataaattagctgctttcggtgcaattaaggatagtgtttttcatgcagatgatgtagcattatttgttttgaaaaatttacgtgaattttatgctaaggatttgcttaaattttctaaattacctgaacagcaaattgctgatatggctgatccagatttgcttttgtcaatgactgaaaaatatggcatgcgtgatgattatgatcgtttttcattatttatgttacaaaaattgcgtaagggtgcaatcggaaggattacgttagatagaccatgacaattaaagaaataaaagagctgttgaaatctgaggtctctgaagcccaaattaacgaacttgaggcagatccgcgggccggcgtacaaaaattgttagttagttatcgtaagcgtcaagcaaaattactagcaaaaaaagaagagtttttgcgtcgcttttcttatgaaaaaaagttctgggaaaagggacaattagtagcgggtgttgatgaggtaggacgtggccctttagctggaccggtagtaactgctgctgtgataattgatcaagattttgatttattagatgtaaacgactcgaagaaattgagcccagagaaacgattgaagttatatcctaaaattttagcggaagcagttagtgttggtattggagtaaaaagtgcagaggtaatcgatcaaattaatatttatgaagctgaccgtcaagcgatggctcaagcagtacgagcacttgatgttaagccgaatgcacttttggtagatgcaatgaatgtgccagtaaatctaccccaagttaaattgattaagggagatgctaagtcgaattcaattgcggcagcttcaattgtggccaaggtctttcgagatcaattgatggatgattatgatagaatataccctcaatattgctttcatcataatgcaggatacggcaccaaggagcacattgaagccttgaaaaagtatggccctacgccaattcaccgcaaaacatttgctccagtcagtgatttttttgaataaatttcaatttataaaaaaataatggtctctttttgcgtaataaatagtggagggctttttttatgaaaaaaacagaatttctactaaaattaaaattgcaaaaagggattggttatgttaaattgctgacaattgctaatcaggtaactgatgaaacagaaattgaatttgaagaattagaacaaattgaattaactgaggaactaatggatgcatgctatcgcgcttttcaggatgatcagttggatcgaatggtacaacaaattgaacagcagtgtgacgtaatcagttttttcgatgaagcatatccagaaaaactacgtcaaatttatcgaccacctatggtattgtttacccgaggagatatttctttactgcaaaaagaaatcattacaattgttggctcacgctatccgactaagtatagtcaagatgttattaatcgcttggtacctaatattgtgcaatctggtcaggttgtagcaagtggcttagcaaaaggcgttgatgccttagctcataaggctgcacttttcaaccaaggaaaaacaattgcggttattggcaatggtttaaatttttcatatccaatgcaaaattttgctttacaagaagagattgtgcaaaagggactattgattagtgaatatttgcctgatacaccaccgcgtccgtatcgttttcctgaacgcaaccgtatcttggccggcttaagtcaaagtataatcgttactgaggctaaagaaaagtcgggttcactgattactgctaatttagcgttacaagaaaatcgcgatatttatgcagtacctggaccaattactaatgcattgtctgcaggtcccaatcaattaattgaagcaggagctacgccaattgttgattttaaatttaacaagataaagatttgacaattcagaaagtattagttatttttggactgtacccataaaataaaataagaattaaggaggcagttaatgcctactaaagcgaaaagtaaaacaacaaaaaaacgtaaaaagaccttagtcattgtggaatcacctgcaaaagctaagactattgaaaaatatttaggaagaaactatcacgttattgcttccaaggggcatattcgtgatttgcctaagtcacaaatgggaatcgactttgaagacgactataagcctaagtatatttccattcgtggtaaaggcgataccattaaagaattaaaaagcgaagccaagaaggctaaggatgtttatttagcatccgaccccgatcgtgaaggcgaagcaattgcttggcacgtagcgcacgcattgaatcttgacgaaaaagccaagaatagagtaacttttaacgaagttaccaaggatgcagttaaagaaagcttcaagcatccccggacaattgatatggatacggttgatgcccaacaggcaagacgtgtacttgatcgaattgtagggtattcactttcaccaattctttgggccaaagttaaaaaaggtttatctgcaggacgtgtacaatcagttgccttaaaattagtgattgatcgtgaaaaggagatcaagaactttaagccaaaagaatattggtcaattgatgcggaatttgctaagggtaaagaaacttttaaatctgccttttatggtgttgatggcaaaaagaaagaattgcctaatatcgattctgttaaggatgttttggctaaaatcgataagaaaaaggactttgtagtagataaagttgttgctcggcaacgtcggcgtcagccagcagccccatttacaacttctacaatgcagcaagaagccaataagcgtttaggttatcgtactcgtagaactatgagtattgctcagcaattatatgaagggatttctttaggtaagcaaggaacagttggtttgattacttatatgagaactgactctaagagaacatcaccagttgcccaacaagaggcttctaagtttttgcatgaaaattatggtgcagaatttgcagctaagagtcaacgccattttaagaatcaagaagacgcacaagatgctcacgaggccattcgcccaacatctgtatatcgcacaccggagtcattaaagagtgtcctaactacggaacaatatcgtttatacaaattgatttggtcacgttttttggccagtgaaatgaccccagctgtttatgatactgttcgtgcagatattgttcaaaatggtgtgatttttagaactactggttctaaattgaaatttgctggtttcaccaaggtttatgataatcaacaagaaaagaatgttgacttacctgatcttgaagagggtgacaaggtcaagatgactaagtccgataacaaacagcactttacgttaccaccagcacgctatactgaagcatcattagttcacgcattggaagaaaatggcgtgggccgtccttcaacttatgcacctacaatagatacaattcaacgccgctattatgttaaacttgatggtcgttcaattgtaccaactgaattaggtgaaattgttgatggcttaattgaaagcttcttcccagatattactgatgttgattacaccgcccgacttgaaaatgaattggatgaagtcgaagatggtaaaaaggattgggttcatgttgttgacgaatactatcaaccgtttaagaaagaattaaataaggctgatagtgaaatcgaaaaggtacaaatcaaggatgaaccagctggctttaattgtgatatttgtggtgcaccaatggtgattaagatgggacgctatggcaagttctatgcttgttctcgtttcccagattgtcgtaatactaagccaatcattaaagaaatcggtgtagtttgtccaaaatgtggcaaaggtcaggttgtcgaaaagaaatcacgtagaaatcgtaaattctacggctgttctcgttatccagaatgcgactttgtctcatgggacaagccaattggcagaaattgtccaaatgatggccactttttagtagaaaagcattctaaaaaaggtccagtgattctttgtcctaacggtgattatcgtgaagacagtgaaaacgaaaaaaacaattaacatagaaaatataggtgagtaaatgccaaaaaatgtaacagttattggtgcaggtcttgctggtagtgaagcaacttggcaattagctaagcgtggtattcatgttgacctttatgaaatgcgaccaaaaaaggagactccagctcatgaaactggtgaatttgcggaactggtttgtaccaattcaatgagatcaaatcaattatctaatgctgtaggtcttttaaaagaagaaatgcgtcatttagattcattgatcatgaaagctgccgacaaaactcaagtgcctgcaggtggagcattagccgttgatcgtgatagtttcagtaaatacgtaactgacactttgcgtgggttagagaatgtaactgttcacgaagaagaagttactgaaattccgaaagatgggattacaattattgcaactggtccgttaactagtgatgctttagctggacagattcaaaaattttctggaactgatagtttacatttctttgatgcagcagctccgattgtggccgctgactcgattgatatgaaaattgtttataaaaagtcgcgttatgatcgtggtgaagctgcatatttgaattgtcctatgactaaagagcaatatgaaaagtttagtcaggaattaattaacgctgaaactgcgcaattacatggttttgaaaatagcgatgtttttgaggggtgtatgccaattgaagtaatggcagcgcgtggggctaaaacaatgctttttggtccacttaaaccagtaggattagaagatccacatacaggcaaaactccttatgcagttgtacagttgcgccaagataatgctgcagcttcaatgtataatattgttggtttccaaactcatttgaaatttggtgaacaaaaacgagtattttcaatgatcccaggcttagaaaatgcacgtttcgttcgttatggtaaaatgcatcgtaatacttatatggcttcaccagaagttttgacagcttcttacgaggcaaaagagcagcctggattattttttgcaggccagatgacaggtgttgaaggctatgtagaaagtgcaggtagtggcttagtagcaggaattaatgcagcacgtgaagctatggggaaagatactgtggctttcccaaaagatactgcgttaggctcaatggctaactacataactactacgagtgctaaacatttccaaccaatgaatgctagttttgctttgctacctccactagagggtaagaagattcgcaagaagcgtgagcgccatgagaaggtcagtgaacgtggtcttgctagtttagatgaatttaagacggaagttttagattaatgaaccaaaggcaaagtgagttagatcaatttttatcatatttacaaaatgagcgtcattatagtgcgaaaaccgttttagcttatcaaacagatttgcatgaagcggaaaggttttggcatgaaaatggtggattcccaggttggactaaagtaagagaacgtgatatccaggtttatctacaacatttagcagaacgcaagttagcccgtagtagtcagttgcgcaagatgtccagcctgcattctttttaccactttttaacccgccgcaaactagtggcaatcgatccaactcagggtattactttacgccgtggtgagaaaaaattaccgcaatttttttaccagcctgaattaaagcaggtttttgattcattgaaaggaaataagcctttgacgatgagaaatttggcaatgtttgaactgttttatgcgacagggatgcgggtaagtgaggttagtaatcttactttgaatcaacttgatttagacttacagacaattttggttcacggtaaaggaaataaagaccgctatgttgcttttgatgataaaacaaaaaaatctttgattgcttatttagaaaatgcacgtccattattacttaaaaatgatgatgaacagcatgtatttttaaataatcaaggaactggcattactagccgcggaattgaaactgtaatgcaaaaaacttttaatcaggcaggaattagtggtaaagtacacccacatgagttgcgacatagctttgctaccgcgatgcttaataatggagcagatttgcgaagtgtccaagagttattaggacacagtagtctatcagcaacgcaaatctatactcatgtaacaatggctcatttaaaatcagattatcaaaaatattttcctcgtaataaagaaagttgaggtttaacatgacaacaatttgttcagtaagatttaatggaaaaacagcaattgccggtgatggacaagtaaccttaggcgaaaaagttattgccaaggcaacagcgcgtaagattcgtcgtatttaccatgatcgtgtagtaattggttttgccggtggtgtagctgatgcagtcagccttcaagatatgcttgagggcaagctcgaaagctactcaggcgatcttcgtcgtgctgccgtggaaatggctcaagcatggcgtaaggatccaactctacaaaaattaaatgcaatgttgattgcttttgatgacaaagacctacttttaatttcaggtaatggtgaagtacttgaacctgatgaaaacgtagttgcaattggttcaggtggtaattttgctcaagccgcagcgattgccatgactcgacacgcaaaagatatgaaggccgatgaaattgcacatgaagctgtaaagattgcttcaggaattgatgttttcactgatgataaaattgtcactgatgaaatttaggagtgaaggaaatggctattaagaccccaaaagaaatagttaaaattttaaacgaatatattattggccaagatgaagctaaaaaatcagttgcgatagctctttacaaccgttaccgtagaatgcagttatctaaagaaatgcaacgtgaagtaacgcctaagaatttattaatggctggtcctactggtgtaggtaaaactgaaattgctcgtcgtttagctgatattgtagaagctccctttgttaaagtagaggcaacgaagtttactgaagtaggttatgtaggacgtgacgttgaatcaatggtccgtgacttggtttccgaagccgtacgaatggaagaaaaggaccaatttgctcgtgtaaagactcaagcaactaaagaagcaaataaagaattagttcgtttgttagctccagcagagaaacatgaacgtcgtgaaaatcaaatgcagcaaatgcaagatatgatgtctatgttgatgggagaaaataatcgcgaagaagatcatgaagaggatgtttctgctgatgtaagaaacaaacgaatggatgtggctgaaaagctagctaaaggcttacttgaagatcacgaagttaccatagaggtagaacaagctcctaaggccaacccaatgagtgacatgatgggtcaaatggggatggatatgggctcaatgcttagtgatcttatgcctaagaaaaaggttaagcgtactttatcagtaaaagaagcacgtgaagttttgattcaagaagaatcacgtaagttagttgactatgacgctatctatcaacatgctattgaaagaagccagaataacggaattatctttattgatgaaattgataaaattattgctggtaataaacgtaattctggtgaagtttctcgtgaaggtgttcaaagagatattttaccaatcgttgaaggctcaactgtaaatacaaaatatggcccagtttcaactgatcatattttgtttattgctgcaggtgcctttgctgaaagtaagcctagtgatttgattccagaacttcaaggacgttttccaattcgggttgaacttaacgctttaaccaaggacgattttgtcaagatcttgaaggatccacaaaattcattgcttaagcaatacattgctttaatgaaggcagatggcattaagttagttttcacccaagaagccgttgataaaattgcggagattgcctttgatgttaaccaaggcactgataatattggtgctcgtcgactttcaactattcttgaaaagctcttagaagacgttctttacgaagggcctgatatggaaatgggtgaaatcacagttactgaagcctatgttgaagataagttaggcgatattattatgaataaagacttaactaaatttattctctaattgatcaaagaatcacgaatgaagcattcaattcaaagtttgaatgcttttttcttttgtttttattctggcttattgacgcattaatgttaaaatataagtaattaagcgattacattatgatttttaactgtttgatatgtagagggaaatttagttatggattacacaatcaagaataatatgatcgaagtagtgatttcggatcacggagctgaagttcagagcgttaaaggagctcataccggtgaagaatatatgtggcaagctgatccagagatctggggcagacatgcacctgtactttttccaattgtagggcgacttaagaatgatgaatataagtatcaaggtaagacctatcatatgggtcagcatggttttgcccgtgattgtgattttgaagtggagaatcatacacaagaaagtatcacgttcttactgaaagataatgaaaaaacgcgtgaaatgtatccatttaaatttgaattcagagttaactataatttgatgaataatttattggaagaaaactttagcgtagttaataaatcagatgaaactatgatttttggtgtaggtggtcaccctggatttaacttaccagtaaataatggggaagagaaagaagattattatttcgatatgcatccatctattgctagggtaaaaatcccacttaaaggagcatatcttgactggaataatcgttctctagcttcgactgatagttttattggtttaagtgatgagctatttaaagatgatgccttgatttatgaattacatggtcatgacaataaagtatctttgagaactgataagagtaagttccacatcaatgtttggactagaaatgcaccatatgttggcatttggtcacaatatccaaataccgctaattatgtatgcattgagccatggtggggaattgcagatagagaagatgctgatggtgagctagagcacaaatatggtatgaatcatttggagccaggtaaggaatatcaagctggatttagtattacttatcactctgcatctgatcctgaataaaatattgaggaataaaaatgaaatatttaacttttaataacggtgtaaaaactccaatcttcggctttggaacatatagaattcagcctagaattactgaaggagcggttgtcgaggctttgaaggctggatatcggttaattgatactgctcaagcatacagtaatgaagcagaagtaggcaatgctattaacaaaagcggcattaaacgtgaagacatttttttgaccactaaagcgcaaacaagtggttatagagagacgaagaatgggattgatgaatcgttaattcacgcccagcaagactattttgatttaatgattattcactggcctatgtctgatagtttaggtacttaccaggcacttgaggaggcatatcaggcgggaaagctacgttcaattggactgagtaacttcaaccatgatcaagtaaatgaaattatgaataatttcgatactaagccagtagttgatcaaattgaaacgtctgtctttaagcaacaaaagaaaatgcataaatatttaattgaaaataatattgtacatgaatcttggtcaccactcggtgaaggaatgaaggctttatttaatgacccaaccttactttctttggctgagaagtataataagacagtgccacaaattgcgttacacttcttggtacaagaaaatatcatgattattcctggctcgacgaatccgttacacatgaaggataatttggatatttttgattttgaatttactgctgaagagatggagacattgcgtggccttgatcaaaaacgtggtattggtggctggcctgcaagtatggatcaagaattagattattaattaaataagcatccctaaaacgatcttttatggcgtagggatgcttattttgtcgtcaaattttgttcatatattgcatgatttttacaaatattgcagagaaatctagatttattaaaaatatttccaactgttacgaaaaaacatttttctttaatcattgtgtgatctgactgtgatggaactgcaactcgaagcaggtattatataaaatgtcaattgcaagagaataataaaacaaaaatgatgaatagtaattgacgttttaatttaaggagagatgttttttgaaaactaaatctattttaactaagactattgctgttgctgctttatcacttgcaggtattggtgcaatcaatcaactagataataatgaagcacaagctgccgttgtgcaaaatgatgcagcagtgtatacaactacacaagctactaccgtttacaataactatgaaaatccagttgcaactggtcaaactctagctgcaggtactaactggaagattataaaaactgcttatgattcaaagggacagaagtggtatgatcttggcttaaatcaatgggtattggcaactaattatactactagctaaaatactcaagctagacaagaaaatacctacactcaaacacaaacgccagctcaacaaactacacaagctagccaaagtcaaagttcatacacttattcaaatgtgaactacacacctaagacgacaacaactagttcatattcatcaaccgcgacaggttccgaagctagtgcaaaggcatggattgcaagcaaagaatctggtggctcatacagtgctagaaatggccaatatgtaggtaagtatcaactttcttcatcttatttgaatggtgattattcagctgctaaccaagaacgtgtagcggataattatgtcaaatctagatatggctcttggagcgctgctaaaagtttctggcaagcaaatggctggtactaatagataactccaagttctgactaagatagatttgttgaaatttcaccttcaacaaacaaagacgactactcgaaatgatccgtaccgtgtcaagtagacagcttaaatatataaattaatttgattaatcagttcgctattgtgcgagctgatttttcttttcatcaatctttttccaaaagtctttatatcttttatcttgttttattggatatgaaattatattctctggattattcttagcttcttttctaacctgacctgcgctcttgccattgaagcgctcctgaggatcataattaatatagtattcaatacttgctttaaaggctttttccatctcttcatagctatttgccttcggataaagaacttctcgcatttctttaattaaaccttgccagccttccattgggccattatcaatacagcggccaattctagacattgattgtggcatgccatgttcttctagctcatgcttaaaaggcatcctggtaaattgaaatcctcgatcactatgaagcattgcatgactattgggctctcttttccaagcagttgacagagcagcgttaactagggctgtatcattgcgcttgcttaaagcatagccaacagggaaacgatcatatagatcaaagatagtacagagataaatcttttgacttgttccaggaattttttcttcagtaatgtcagtgcaccatttttcattgggtttagtggcattgaagtctctatgcaatagattttcggcagtttcttccggtctagcagcttgatagcgatacctcttattaaatctggccttgctagtatagatgccattcacgcacatcaagcgagccacagttctacggtatattttggcctcaccgtctgctagctcattgtttaaagccaaagtcatcttaggagaaccaaagaggctgttattgctctcagctatttctttaatacgcttaagaatcttttgatctcttagttcacgtttgcttggcttatgattaagccatttgtagtaggctgaccgggcaatattggcttgtttgcacatccattcaattgaccacttatattctcggtgacattctttgatcaaactgtaaagagaatttcgctgctgttgtttaagtgctatttgtctttgttttggctgtccagcaaacacatcctttctaattccttcactttttttaggaaggctatctcttggtctttaatatcattttcttttttaagctgttcaatttcacgctttagcctttgagtttcagatagctcagcttcttttaaacgatgaccgcgcctatctgctaagccgtcagttccctttgcgctgtatttttttgaccagttgtatacttgggcatagctgcagccaaatttaagagctgcttccttgtagttccattgatgatccttgcagtatttcactatctgtttacgttcttctagggttgtcttttttctcttagtcatataagcctccagaataggattgtagtccttgagttcttgatgactattatacttgataacccactgctttaactgtgcagcacttcgcaaaccaaacttatttgttagataatcatatgagccttcgccatttaaataggcagctatgcatttgagtttaaaatctttactgtatctttgattatatttatgtggtcttaatgcttctggcccatgatctttaaatgcatatacccattggcgcagtgtagtcttgccagcccctaaaactttcgcaattgaagcaggtgatgcttcgccacttatgtattgtttaactgctttaagcttagcttcatagctaaatttactttttctagacatacaaaaagtcctgctttcatagatagtacaattttatatatttgtactgtctactaaagtaggactatatcaaaatgggtagtcgtttttgcttgtttatttttttaattcaaatttactggtttctacatagagtgtcatatttttacgatagtaatttaaagttttcattgaaagatgtaatttttcaatataatccgcttctcttaattttgaattagacaaaacagagtagacataagacatccgaagcttatgtgtagttaatggcatgccgactattgaacggtcaggggcaatttttgggttaatattaaaatcagaagcgtaatgtttgccatcgcggcgagcaaacagatagggattatcgttattggcaaaattagtgtgattttggatatattctctgacatcattttctttaacttttaccaacaattcatttacatgcaaaatcataatttcttttggcttaaaaccacaagcaatagcagccatcatcttgatagtttcaggatgaatattttttatttgaattaattctgataaatgattttcccagccaataacatagtgttgcttacgattgaagcgattaccacgtaaagtgagcaatggataagtaatgatgtagccatattcattcaaaaaaacaaaatacatctttatgtgactaagatatttatttactgtattacttttcatatggagtttattttcaagtgaatctaaaaagttacgtatatctccagttgtaacattttctacatttgcttcagtagcatctaaactaccagaataataatcccaaaaagttgaaattgaagaacaggctagagaaatagttgaatcggctagtttcttttgttgtttacagtaaatgcgaaatttatcttcatatggaaaagtcaagattgaggctcctttcaaacattcgttaaaaataattatacattatttcaagcacgttgttactaaatttttttattaaataatcaaactgcgtgtcgctttgcgacacgcacacaatacaacttgccaaccaaacagaaaagtcgtatgatgataactgtcaactgaataggcgatgacgttcgccattaaccgagtaaaatctaatgacgtctactttatccgataggggtaaagtagacgtttttttgtgggaggaatctgtttgaattcaaaatttattaattacattagtatcgctattttcgccttttttggtggtatggcacgtgctggtttaaatgcaaacttcagctattatggtactttttggggtaatgtcataggttgctttttattagcgtttttcacctacttttttattgaaactaaagagattaggcagtggcttgtagttggattaggtactggctttgtaggtgcatttactactttttcaacttttaatcttgatgttttaaaaaatatgcaggctaatttgccaatcgaagcagtaatttattactttagctcaattatttttggctttttttttgctatgttaggaatgaaaattggtaaaaaagttggtcaattagtaagaaaggaaaggaatacacgatgaattttttgcttgcaggaattggtgcatcaattggagctatgcttcgttatgctattactaattatggtaaaaagcattgggaatggattggtaataaattttctaatttacctacaccgactttgtttattaacttaactggagtactaattttaggcttgatttttggaattggtgctaacacttttatttatgcattactaggaactggagtaatgggtggctatacaaccttttccactatgaatacagaattagttgagctttataagagtaaaaattatcgtggtcttgtattctacgcagtgtcatcatatctgggtggcttggttctagtttattgcggctattatttaggaaatttactaaaataatgttgacagcatgaaaaaaatgggtttgcttgaacagattaaaaataggggattagtcctagatggtgcaatgtcgtatgaattggaaaaacaaggcgtagatactaataataaattatggaccgcaacagctttgattgatcagttgagcaaagtttatcaagcacattgggattggttaatttttataaaaatggctggttccccaacggctggggtggagtatttacaacaatgctaacagtaaactttgctttttcaggaactgagcttattggcattacggctggtgaagcagagaatcctcagaaagctattcctgaagcaatcaggacaacactttggcgtttaattatcttctttattggctcaattgtagttatggccgcattaattccttatcatacggctggagtaactcaaagcccatttgtgtatgtgcttgacctaattcatgtgccatttgctgcaaatattatgaacttcgtagttttgactgcaattatttctgcggccaattcaggtttgtatgcttcaactaaaatgctttggtcgttgggcaacgaaggaacaattcctaaagcattcaccaaaactaataagcgtggtattccagtattgtcattagtagtaagtatgttagacggaatttttgctttgatttctagtaaagttgctgcctcgacggtttatctagtattagtttctatttctggattagctgttgtattcgtttggacggcgattgcatggtcagaattgaagtttagaagggcatttttaaactcaggtcatcaactcagtgaattgaagtacaagaccccatggtatcctgtaattccatattttgcatttatatcaagcctgctttcttgtgtattaatctggttcgatccaacccaaagagtagcattgtactatacaattccttttgtagctatttgttacttgggacatcatttttggctaaaatctaagaaaaataatgaagaagttttattggaaaaataaaaaagtcaggaaactgtcaaatcttttgtgtaaatagttctttctcgtaaattgattttttaatcatttatttaatcaaaataggattctaaggtatcctgaacctgaccaaagcctttatgaattcggtcgaaatagcggtcattgtagctcattgcctggatgccaataaatacatcaagcgactgttcagttggaaactctgccttaggcttagctttgcgcttgatcacattgttaaatgattcaatcatgttagtcgaataaattgaagctctgatctgcttgggatagttataaaagaccagcagatctggttctatgtctttcaagcttctgataacatggctgtaaaccttgccccatttggtatagaagtcatgcaggacagctgtggcttcttctttgtttgtctgttgatgcacctgtttgaattcgttcatgatcttttcacgatcgtcgacgcgtactttagcgcagatattgcgcatgacatgaaccaaacagcgttgaaaatgagctttaggataagtcctggccaaggctgttttcatgccaacaacaccatcagaaagaaagagttcaacttgcttcaagcctctggacttcatgttttgaagcatctctgtccagacttcaatgttctcactaggagcaatgcagtagtcaatgacttccttatgtccattaggtttaatgccaatggcaatatagactgcttcacgctcaaacgtttctcggcgcaaaggaaggtatgtcgcatccaaatagacgcagaaaaacttgtcgcttagcttgcgtttgtggtaagcctcaaccttggggagcatctgcttggaaatatttgatacctgagctggactgtaatggctgccatacatcttttcaattagatcggctatttccctggtggtcacgcccttggagtaaagcttgataatcatgctttccaagatatccgagtgctgcttgtagtcaggcagcgtgtgctgatgaaattgaccgttgcgatcccgaggcacttgcacttcaattgggccaaattgcgtatcaactttgcggaaataagcaccatttctagagttgccagtattccagccatttctggcatagggatcatagcccagaaaggcagtcaattcagcttctagcaagttattaacagcctgttgtagttctttgcgcaataaatcatttattttgtctggattgaatagagcttgagcaaaatctttggtaaaatcattcatgaaggagttcttctttctgtatgtgttttttttgttcaaaccaatcatacgagaaaggaactcctttttctaatgtttaaagaaataaatttaaggaatcattcatccttacacaaactattttacagtctcaaagtcactagtgatatatgacactagcaactttctatagcttatatactgcattaaaacaagatcagtatataagcttttttgatacatgtaaaaatttttattcggcgtccttagtccaattcatagatagcttcggcataaatcgcaattgaattaattaggtcatctaccttcatatattcatttgcttggtgcataaccattggagcatcttcaggttgagcgccatatgcaactccatgcttaaataaacgcccataagtcccaccgccgatcacgacttcatgacctttattaccagtctggcgttcataaactttgagcaaggtttgaactaatggatcgtctccaggtacataatgaggttcttcaaatgaagcaaaacttggaattaagatatcaccaaatttttcttcaacttgattaaccatcttatctggatcagtaccttgaggatagcgaatattatctttcaaaacagcatttccattttcctcgtagtcaaacattgatggagcacttgagagatcacccatcaagtcatcatgatgagcaacgcctaattttttgccgttaaagtcttcatgttcaacatcggctaagaaatgaagccagcttttatcgcgaccagcaaaatcaaattgatctagaaatactgccaaaaatgtagccgcatttctaccaacttgaggtgcagatgcatgggcaccttgaccagttaattcaatcttagcttcatcgccctcaatagtgaattcgccttcaagtttattatctgataaaaacttagtatatttttccttcattgtggctaaatcactaccaacaatagttgcataggccttttgaggagttacgttttcggcaatgccggccttgaatgacttaaggattactgatccctttttattgtcatctttaaaggtcatggtcagggtatagatcccttgttcaccgttgataattggaaattcggcatcaggtgagaatacttgatcaggggttggctcatgttttaggtagtaatcaatgccaacccaattagtttcctcattggttcccacaataaaatcaatctttttcttaggttcaaatccagcttctttaagtaaaagcatgccataatatgcagctagggcaggacctttatcatcggcagaacctcgaccaatgattttaccatccttaattaacattttaaaaggatcagttacccagccgtcaccagctggaaccacgtccatgtggccaataatgcctaaacgtttttcaccagtaccatagtcgacacggccagcgtacttgtcaacatttttgatatggaaaccatcacgctgtgcaaacgataagaatttcttcattgctttaactggacctggaccaacaggatactcttcggaagtattattcaaatcctcagatgagtcgattgcgattaattcgtcaagatcacgaagaatgtcgtcctttttggcttgggccaatttcttatagtctaaattcatattctgcctcttttcttattttttgttagctgaaattttaccagaaaaattaatattaaacaattatacatttaaaatgggaaaataatgagcattaaagttgtttttagttaatcgtgtcatgtacactataagaaataatatagataaaaattacagaaagtatatagaaacggaaagattattatgagacaacatgttcctgaactcgatcgcaatttaagtaacgacgaattcctagatctaatcgttgattgtttccattcagtaatttttggtaccgttgatcaaaatggtgatccacataccaatattatcgatattgactttaatgaagatggtcgtctgatttttgcaacgactaatcagaagtcattttatcgccatattaagggacacaataaagtttcaattaccgctttgcgcggaagagaaactctcactagcattggtttcactctagaaggctatgttgatgaggtaagtccacaatatttagaacgaatttataaaatcaaaccaccaatgcatcatatttatgctaataaaactaaagatatgaacactttacgagcttttgcattaacaccaattattggttctgtttatgatttacggtttgatcatgtttttcaaaaacaattcgactttgttaatgttcctagtaagatgcaggttgaaatcttagaataataaaataaacatgcctcgattttcgaactgatcgaagcatgtttattttatatattcatttctttacgttcttcgcgttttcttaagtatggtagtaagaagcctaagccaaagagtacgataactgtaataatattcataattaattggtgattaaaggctgcgctaccgaatgttgcttctgcttcttgaggaataaatcctaaagtagcacagataaaggtaaagattaagcaccaccagcccatgataagggcaccagtcttatttttaatgaagacataatctgagtggaacttctcttggtgcatccgtaacataatgaaagcgaagaatacccaacaagtcttgtatggggaaataataccattgatatttaaaagccaattgtaaattgaattaatatttggcaaagtcccagtaagtaaaagcaagaataaggctaaaccacaagttaaagtgtacgagtgaactggacgacctgttttgtcttttttcccagttaaccattttggcatgaatttgtcggcaacgtcaccggcaaagacacgacttgatgcatcaagtaaaactgctaattgggccatcataaagagggcttgaacaacagcaaagatgtacattaatactttgccccaaccaaggctttcgcctagtagttgaaatgcatagtaaggtccgttcatcttgaaatcatgtggaatatgatgagcattgaaaaacattgctaaagccaaagtaccgaagatagtcaagaatccagtcatcaaagccaacatccacattgctttaggaaattcgtgttttggatcgcgcatttgtacgatataaggagcagcaagttctgcaccagacatggcgaagattagaagaccagtggtagaaaagtaacgtaaactaaatgatggcttaaatgcggccaagttaaatggttgggtagcaatatggtgtccatgcataactgaccaaacagcaagtaaaacaaagagcatagacataataaacattgcaccaccaccaattaaagatagtagttcaagtgaattcttgattgcattttcaaccaaaataaaggcaagaataatgacaaaggtcaaaatcccaaaccaaaaagtagacatatgcttgtctaaagtattgttgcccaaaataatccatgaaaaggacacaataactgaattagaaacatcgaccaaataaggaacagtttgaacccaatacatccatgaagtccagtagcccagtgtatcgttagatgaatgacgtacccaagatgccaatccaccggcttgatcagtaaaggttaggcccatttgactagacatcaatgcataaggaataacgtaggcgaagagtaggaaaatccaagatacaactactgataagccttgattttgaaatggataaaaaatattttcaaaactgataatcgttacgaagtcgatcaatgcaataaccggccatgacatgtagtgttttttgccgggttcgaaattgactgtttcgattgtttctgacataaaaattcctccaagttaagctattttattgttgtgttgacatagctgttctcggaggcgagcaaggcaaatgcacttgttaaaaacctccaatatttatataataatttcagctgtagcgtattttaagaaagaatgcaaaaagtacgctatactgtagaaaaattataaagactttttaaagttttgcaatatgtaaaacggtttcgtggacaaaatggaaagaaaaaggatggattttttgaaaattgccattggaaatggcgtcaatgttaataagatgaaaggttggtcgtcaattccaattggcgatgtacaaaatagtgctgaacttgccgcaattgttgtcaaaaatgatgatgcattaggaataaaacaagcagaagctctaagagaacaatctggctttccgattccattgattaaagtaactgatcaggtagatgaagaccaagtcactcagaaagctacagaatatgaaaagcaaatggtgccaggctttttgaccgacttgatcaattttgctcaagcaaaaccaatttcatttactacaccgggtcaccataatgggcaatattatgacaaacatcctgccggagtagtttttaataagttctttggtaaaaatctaatgtttgccgatacaagtgatactgttcctcaattaggggatacaatgacgcatgctggaacgccacttaatgcagaaaagaaagctgctaaaacttatcatgcagataaggtttacttctgtaccaacggaacgacttcagctaattctatttgcgcaagtgcacttttatctgaaggcgatctagttttatttgatcgaaataatcataaatctttgtataattctgccttggtaatgagcggagcaaagccggtctacattccaactgatcgaaatgcacttggactaattggagaaatggatccagccttcttaactgaagataaaattagagctgaagtagctaagatagatccggcaaaggcaaaggctaagcgtccatttaggttaacaatcgtacaagcagaaacctatgatggagtcttttatgatgcacagtggattattgaccgaatcggtaaactttgtgattatgttctgtttgactgtgcctggggcggctttgaagaattcgtgccaattatgagacatttatcaccacttctacttaacttgggtcctgatgatccaggtattttggttactcagtcattacataaacagcaagcaggtatggctcaagcgtcacagattctaaaaaaggatgctcatattaaaggacaaaaacgatatgttgatcataagcactttaatcatgcttatctgaagtttgttacttccagttatgcatacccactttatgcttcattaacagttaattcctacgttactgctggagcaggaaataaaaagtggtgggatcaaactctgcgaatgggaattgaatggcggaaaaaactactcaaaaagtctaagctatttaagccattagttcctgacaattttgccgaaatttcgactgatgaattggctaccaatgcagaatattgggaaatgggacaaaatacggattggcacggtttccgtaaaatggttccaggcgaagcaatgattgacccattgaagattacggtaaaaactcccgggattgatgttaaaaatgcaaaatatgagaaaacaggtattccaggcgcggtagtggcagaatacttaatggaaaatcatattattcgagctaaaaatgatttgaattcattgttgtttttacttacaccgggagatagtcaagcagaactagatactttacttgaagcttttttaagttttgaaaaacactatctagaagatgacttaatgaaagatgttttgccggttttatataatgagtatccaaagcgttatcaaggctataccctgaaacagttgtgtcaagagatgcatgagtactatcaggaaaataatacttttgtattacagcaaaagctattttctaaatcagggatgcaagactatcaaatgacaccagctacagctgatcagctttttaaaaaagatcaaaatgaactggtcaacctagaaaatgttgttggaagaattgctgccgaaggagctttgccatatcctccaggtgttttcattgttgcacccggtgaaaagtggggaacggtagatcaaaagtactttgaagtcttggcgcatgctattgaaaagtttcctggttttgtgccagagattcagggagtatatctgagcgaaaataataatggtagtttatgcgtacaagcagaagtaatcaaaaataaatagggagttaaaaatgagtttttcttggaaagagaatttaccaaaagagttaaacgataaagtgactaaagttgaaaaaatgatccaacctcgtttagaaaaaattgatgaacaggttttgtataatcaacaacgtgtattggacctatttagaaaacatcatgttggtgaagaagatctagttccatcaacaggctatggttatgacgatataggtcgtgataaaattgaggatatttatgccgattattttaaaacagatgatgctctagttcgtccacaatttggctcaggtactcatgcaattacagttggtcttttcagcatgcttcgcccaggggataccctttattatttaactggaacgccatatgataccattcaagaagtaattggtcttgctggtaataagcccggtaacatgaaggaatggggaattaattttaagactactgaattgaagaatggggaagtagactacgaccaagctaaaaaagatatcatggatccttcaattaaagtagtggcaattcaaagatcattaggttatgcaactcgtaagacttttactatggctaagattaagccaatgcttaagttcattaaagaagttcgtccagatgttaatatttttattgataattgttatggagaattctctgaatgtgaagaaccaactttttatggtgctgatatgatggctggttccctttataagaatgctggtgcaggtttagtaaaaggcggtgcttttttagttggccggcaggatttaattgatggtgctggttcacggttgacagtgccaggagctggaaaaggtgaaggcgcaacttggggttatttgcgcgatatctaccaaggattctttatggcagctcatactactggtgaagctcaaaaaggtatggtctttactgcagccttattagaagaaatggggatgcaggtttcacctaaatggagtgatccacgtagtgatattgttcaaactgtcacttttggtaaacctgatccgatggtaaaattctgtgcggctattcaacactattcaccaatgaattcatttgttgacccaattccatatcatcaggatggttacgaagatgaagttgttatggcttcgggaagtttcgttgaaggatcaacaattgagctttcttctgatggccctttacgtgaaccatacatgctttatattcagggcggtttgtcctatgctcatgataagattgcgattactcatgcagtagaagaaacattttataagtaaatttaactctaaaagattcacatttttctttatttaaaagtgtgaatctttttatcttgtttggggtgaattgttaatttagaataaaaagtagcaatttaactagttaggataagtttatgaatccagaagaagttttaaaagatacatttggctatacaaattttcgcccaggtcaaaaacaagtaattgatttagttttaaaaaagcaaaatgtgttagcggttatgccaaccggtggcggaaaatcaatgtgttatcaaataccagctttgattaattccggtgtaactttggttatttcaccattaatttctttaatgaaagatcaaattgataatttaaagcaaaatggaattaatgcggcagcattaaattctactacaccgcaagaagaggttaatccaattttacgtcaggcatatgaaggcaaaattaagttaatttatattacacctgagcgtttagcgattgattattttagatatcagttaaattttttagatattgatctagttgctgtcgatgaagcacactgtatttcacaatggggacatgattttcgacctgcttatcgtcaattattagatggaatcaattcactaaaaagcagaccaaatatattagctttaacagcgacagccacgcctgcggttcaagatgatatttgtgaacaattgaatattcccaaggagaatatgattgttacctcttttgctcgccctaatatatcgtttaaagtggtcaactcaccacaaaatactccattatatatttcagaatatattaaggcacatcaggataaagcggggattatttacactaatacacgtaaaaaagttgaaagtttgacagattatttggctaagaaaggaatctctgttggtgcttatcatggtggaatggattcttcagaacgaagtcaagtacaagaagcttttcaatttgatgaatttcaagtaattgtagcaactaatgcttttggaatggggatcgataaaagtaatgtcagatttgtgattcatgcctcaagtgcccgtaatatggaaagttactatcaagaagcaggtcgggcaggccgtgatggggaagaaagcaaagcgattttaatctatcatcctggtgacttgcgtcaatatcgctactttattgatgaatcagatgcggatgataaatatcgagaactgcaatatcgtaagttgcaaacaattactgattatgctaatactggtgaatgtttgcagcaatttatcgtccgttattttggtcaagattgtccgccatgtggtaaatgttcaaattgtctaaatcaggataaattgactgacattaccattgatgctcaaaaagtgattagtatggtttatgaactagatggtcgctttggaaaaacgatagttgctcaatgtttgattggctcaaaaaatcatcgcatgcaagaaatgaatgctacacaatataagtcttttggctctctaagaatgaagcaaaaagatgctataagcttgattgactatttaattgcttcaggttatctagaagttgaaggtagcaaatatccactagtgcatgtaactaatcatgggtgggatgtactagatggcaaaactgtagtcaaacggcgaattgctaagatttcagtaactactactcatgctggtgaagaaagtgatactttatttgaagctttaagacaaaagcgtttggaattagctaagcagcaaaaagtaccagcatttatgattttttcagatcgctctttgcacgatatggcacaaattaaaccacaaaatgaaagtgaatttttagaggtaagtggtgtagggcaagcgaagatgaaaaagtatggtcaggctatgatggaaataatcaaaagaaaaggaaaatagctaaaataataatattaaaatacgcgtggtgctagttaaatcgttctagacaataagccaaattataagctaaaattgcaatttccaaccggctttgaaagcctatcagactacgtgctcgattgttctcggcattgtaatagatcagaagcgaaaagtcgctttcaattgttctgcgaatagccatcaattgatgatcattgtgctttttagctcctgtcatatttttacgatatggtgtccaaagttcataacccatttgttttagctgttgatgcagttctttgcctaaatagccttcgtcgccaagaagatagtaattagatggatgggcattttccagcagttcaactgtctccttggcatcatgaactgatgcttttgttacgacataatcaagaatgtaaccgtcatcgctaacaatggcatgaactttgaaaccatagaagtaaattttcttggtggccttataaccaatgttggcataaccgcgaaaaattttagcacgatagttgcgaattggttggcaaacaggtaccggaaagctgtcaatgatcaagaaatgtccattcaggtcaacctttttattcatttcttgccgtatctgataaatcaattgcaatagctgacgtgaacgccgattaaaacgtgagtgtgataaacaattgaaacattcacagaatcttctttgtgattcaattcctgtcttagcttgccagataagtaaagccaaaatcagactgtccgtagttttaatttgatcaatatttcgccgatgagtaaactcagccggtgcatacaaacgataccagtgccgacaaattatcactaaatctttaaaactaacttgtaaatggtggctaaaacgcttaagcttaaggcagttcaatcagatcaggctcttttctattattatacaagttgagtctaacaagattggacttttttattaactaaaacttgaaagctaagattaacgctccttccccgcgcctcttggctttttcttatcaaaaataaaaacgcaggatctctctgcgttatactttaagtgtcgacctaaaaagtaaaggagatcctgcgcaatgaacagtatagaacaaatcgacacagaaaatgatactaaatccttaatttcttcatttattaatctaattggtctagctaagttaactaaacaagtcaattttaagcgtaaatccaccgtttcattaaccatgattatctcttggctgatgtcagtacattttgctcggctttctttattcagagctaaggatgacaaacgtttttccgttagaactgctcgcaatgtacttaacgatggaagaatcaactggcaaaaactattatgcttgattgcagcccggctcattggctgcttaaaaccatttatcgataaaagacgccgacttgcttttatcgttgacgatacgctgatggctcggtctttttctaaaaagaccgaattgctagctaaagtctatgaccatgacaagcatgagtatttgaacggatatcgtggtttaactttaggctggagcgatggcaataccttcttgccggttaactttgccttgatgtcaaccaaaaccaagaaaaatatgattggagctgctcccattactgctgatgaacgttcaatttctggtaaaaggagaaatcaagctcagagaaagatgaatgatgtaactgtagagttgattagacaagccttacgattaggagtagaagctaaatacgtcttattcgattcttggttttcttctccaagaatgttttggattttaaagaagatcggtttagatggacttggcatgatcaagaagagttcaaagatttattacatttatcgccatcgccgctatagcgttaaagacttgtatgatcgtttggctgcttcaaacatccgtaaaaagaaacattatctttattcaagcatagttgaggctcaatatcatggacatagctttttattaaagctcgtctttgtctccaaccgtggaaacaagaacaagtatttggttttagctactactcagacaaagcttagccctgaagaaatcatccaactttatggtcgtagatggcaaattgaaacatattttaagacgtctaagcaatatcttgctttagataaatctcaagttcaaagctatgatggccaatgtggctatatcgcagttacagcaataacttatgatctattgacctggcaggaaagacaaaatacagatgataagacaatcggagatttattctatctaatgaacgaatccttacctgatattagattcgtagatgcattggtctacttaatttcagaattaaaagagcttaaacagaatagttttgaaaagatagatgaagtaatcaatgactttattaaccaactgccacgattcatacaaattgcactgaaacagatcatataaaaactaattacgtctaagaaagctcaatagtgacaggacttgagcttgattttggtgctttcaattttcagttattaactaaaacgatttaactagcaccacgcgtattaaaatattggtcaaaccggtctttttttattacaataaatgtaaatgaaagaaggactaaatttatggctaaaaaaacattaattatctattattcttgggaaggcaataccaagaacatggctaaaaagattaacggagaaattgaaaacagcgaattaaaggaagtaactgttgctcctgacgcttttgattcagatatgtacaagaccaacgatattgctctagatcaaattcaaggtaaggttccttatcctgaaattcaaatggatgatatcgattttaataattatgatttgattttagtcggtagccctgtttggtcaggctatcctgcaactccaattaagccattacttgaaaagatgaaaaactaccgtggtgaagttgcatcattctttacctcagcaggcactaaccataaggcttatgtcagtcactttaaagaatgggctaatggtctgaatgttgttggtgttgcacgtgatgatagtgaagtccgcgattgggttaaataattaacctttagaatattaaaaatcagtacaaactccgtgttttgtactgattttcttttgtattttaagaacaaaaataagagttacaaaatgtaaccctcatttttatttaggacacgaatcaagcgccgttacgcatgactcctagcttgatgggtgtctctaaatatgtggtatttttatatctatcaaaagaaaaaacaacggtttctttaatcaatatcacaacaacacctcatttctatgtctttcaaaagtaagcgcttactttatctacttataatatatcatataacacatatttttaatagtaattttgtcataattttccaaaaattggtttgcttgttggtaattcatgattatagattaaaagagataatgactaaataatggaaaggggatatttaatgacgattccaacgaaaattgaagttcgtggcggacgagtacataacttaaagaatattgacgttgacattcctttgaataaatttgtagcaatttcaggactgtcgggctcaggaaaatcatcactagcaatggggattctttatgaagaaggttcaagacgctatcttgatgctctgtcaacttatatgcgtaggcgaattaaacagggaaatcaggttgatgtaactagcgtcaaacatattccctccgcattagctttacggcagcgtccaagtgtaccaaatgagcgagctacagtaggaaccttgagtgagacttttaatgttttacgcttaattttctctcgtttgggttctccagtttgtcctaatggacaccatttgaagccaagtttggcaattgcaaaggcaatgagtatgtcaggtgagcaaatgggacaattaacttgtccagtctgtggtgtaaaattttatgcaccaagtgccgaacaatttgcttttaattcagatggtgcatgtactgagtgtggcggaactggtaagatacggcaactagatgaatctaaactgattacggatgaaaatttgtcaattaaagatggtgcagttgcatcttggagcttgccaggacggaactttatgcctaacgttgcagaacatgctggtgttaggatcgacattccttataaagatcttactgataaagaaaaagattttgtcttaaatggtcctgaaaagaaatataaaatggactttttatcaggaactggcagggtatttcatgattttaatgccttatatgaaaatgctcggcaagctgtctatcgttcagcaaagagtagcaaatcggaacgtgcgcaaaaaagaatagccgaattctttacttattcgacttgtccactttgtcatggtagtcgtttgaaaccagaattgttacaacagctggtcggtaagcaaaatattaatcaggtggccgaaatgcagttaggtgatttagttacctgggttaaagatgtgcaagcaactttaccaactaatatgcataaaatggctcattcgattattcaggagtttttggataatttgcaaccattattagacttggggctagactatttgactatggctagaagtggaaataccttatcgacaggtgaattgcaacgaattcaattagcaagaacattacgtactgaaactactggaattttatatgttttggatgagccttctattggtctccatcctgctaatgttgcaggattaattaaggttttacgaaagttagttgctcagggcaattcattagtagttgttgatcataatgttgacattattaaagccgctgatgaggtaattgagattggtccaggttcaggtaaaaaaggtggtcagattttggatcaaggttcaattactgcaatcaaacatgatcaacattctttaattcgaccatatttggatggtagtgctaaactacttgccagagagccagccactcgaataaattccgattctattttatttgaagtaaagcaatattttaatttacatgatgtaaaaactaaaatcccactaaaccaattaactgcagtaactggtttttcaggtgccggtaaaactagtttgattctggatagtttagtacccgctattatagcaaaaagccaaagtgaaaaattgccaaaacaaattagtagattttctagcccaatttcaaatgtagtaagtgttgatgcatctccaattggtaaaagtactcggtcaactgtagcaacttatacttcaattatggacaatttacgaaagttatatgctagtcagccactcgctaaaaagaagcattatacatcaagttggttttcatataataataaacaaggagcttgtcctacttgtggtggtacaggaattgtgactcttgacatccaatttttaccagatatgcaacaagtctgttcaacctgtcatggcgatcgttataatcaagatgtacaaaaggtgaagtggcatgatctgtcaattgttgatgtcctaaatctagatgttaatgaggctctaccgatttttgttaaagtgcctaagattgaacgagagctaaaattgttaaaagaagtaggcttggattacttacatttgggagaagatacaccaactttgtcaggtggagaagctcagcgccttaaacttgttactcatcttagtcataaacaaaatgatgcattgtttgttttcgatgaacctacgattggcttgcatcctcttgacgtgaaggttctggtccaagtaatgcaaaagttgttagatcagggagctaccattattacaatcactcatgatttaaatttaattgtcaattgtgattacatgattgatttaggcccacatggtggtaaaaacggtggtcggattgtccaagagggtaagcctttagaattaaagcaaaagcctgaaagtttaacggcacactatttggccaattatttacatgatttcaaaaatctattttaatattatatgaaaatagcattaaataaatttatagcaaactgtagctaaaaaataagacataggaagaaataatatttgaaacagatctaagattaatgcaatattaaatatatattaactatctactcaatttatactaaggtgagaaaaatgaatttgctcaaacagatccgtgatcgaggattaatcttagatggtgcaatgtctacagctcttgagaagttaggcattgatacaaataatgaactttggacagcaattgcattagaacataatcttgctcaaatttatcaagtacatatgaattattttaaggctggagcccagatggcaattactgatacttatcaagcaaatatcccagcttttgaaaaacatggttttacacaagaccaggctactaaattgattactaatgcagttcaaattgccaaaaaagcccgtgatgattttgcaaagacaacgggaattcataattatgtagcggcttcagtaggaccttatggtgcatatttagctcaaggggatgaatttcgcggagattattctctaacaacggaggaatatcttaattttcatttaccacgattgaagattttattggcaaataaacctgattgtctcgcacttgaaactcagcctaaattggatgaagttgtagcaatcttagattggttaaaggaaaatgctccggaaattccagtgtatgtaagttttacattgcatgatacaactaaaattagtgatggcactcctttaaagcgggtagtgcaaaagcttaatgaatatgatcaagtatttgcgattggagccaattgctttaaaccgtttttagcaactgcagtaattgataaaattcatgattttactgataaacaaattgtcatttatcctaacttgggtggcgtttataacgaatttgagcgcaattggattccatttaatgcaaaattcgattttaaaaagttaagccaagagtggtatgaacatggtgctagaataataggtggctgttgttcgactaccgaaaaagaaattggccaaatttccgccttttttaagacaattaacaatgctaaaagcaaatcagttaaatcggagctaaaaaaggttaaaaatgatagcaatatacaaatttgatttttaataattcatatactttttttgaaatttatcaagtaaaaatctttatctttttatttttatttgatatcatagtagcggagcgtgtgatgagcgctccgaggatgaaaaggctaagcaagatgtttcttatgacatctgctgataggaagaaatttgaaggtgtagaaaagccattaaggacattttccttagtgactttttctttttgcccaaaataaatagccgacttatcgtcgactatttttaatcttaaaaattatttttgtctgtttgtggagtaactttatcccaaattgcatctactaagccaatccacattaagcccatagcaactgagccgcaaacatcacttggccagtgagcgtagagataaactcttgaaatcattactaaaacaagccaaatagctaataaaacagtgagccagattttagcagttttatttttaactaaagctggaatcaatattagtattagccagaaaacaataatcgccattcctaatgtgtggccactaggaaaactgaagccatcatcagcagctaagtgagcagttggtcgtgcccgttggattatatgtttaacaatccaaccaaaagcatcagctgtaactagtgaaatgacaatacttgccgaaagaggacgctgctttttcagccaaagaatgacagctatcaacagcatccaaactaagtcaactttagtatctgctaaaaatgtaattacatgcataatgctctgcagattaggaatactgtggactaagccttcaaagaaattgtcaaagccggtaacccaacttgcatgagccataatagagaatgcaagaatcaaaaagatcggtaatccgatacaaatagaataaatattttttttgcgcattttttcctcgtttatacttatttttataacaataatgagtttatcatagaatatgagtagaaagagaaaaattttaaatttgccgattgtaaaattaaattgaacacttgatacaaaataaaaaagtccatttggacctgtttgatagaatgttaataaccacaaaaacatctatggaggtcaaaatggactcactacattctatcatggacaagcgtaaaaaaggaacacatctatcgcttgaagagcgggttattattcaaactcgtttgaaagatcattgttctttgcgttccatcgctcgagaaattggctgttcccctagtacaattcactatgagatcaaacgaggggctgttaagctgtatcacggtaaagttaaacgttataaagcccaacaaggtcagagtgtttatcaaaacaatcgtcgatactgtggacgcaaatcggattttcttaagaagcataagtttattgattacgtccaacagcacttttttgaagatggctggtcgctcgacgcctgcagtaatcgctgcactgctgtaggggaatttaccagcaacgatattgtctgcactaggacgctttataattatgtcgatcaaggcttgttaaacatccataactatgatttgccagagaaactcaagcgcaataccaaaattcatcgcattcgtaaaaataagaagaagctaggccgcagtattgaacaacgaccacaggaagttaataagcgtgatgtgtttgggcattgggaatgtgatcttgttttaggccataagaccaaggacgacgaagtgctgctaactttgtctgaacgcatgagccgtgagttcctaattattaaaatcccagataaaacagctgccagtgtaatgaatgcctttaaaagtctgcgcaagcaatacagcgagcattggaacgatatctttaaaactattacgactgataatggttctgaatttgcggatctatctcagctggaagatatttccaaatcactagtttattatgctcatccatatacttcttgtgataaaggcactgtagagaggcataatggccttattcgcagattcattcctaaaggtgactatattcataactactctctccaacaaatcattaatattgaaacttggtgcaattcattgccaagaaagatcttggcttatcatacaccagatgagatctttgaaagagaattagatcgcatctatcaaacagcctaaacaaaagtgttcaagttattattgcaatttacgaaaattttaaattaattggaaaataatcatggaaattaaagagataaaatctaataagaagcagtatatagacttacttttgttagctgatgaacaagagagtatgattgatcgctatttagaacgtggaattatgtatatcttgattgataaaggaaaagttagatctgaatgtgttattacggttgaaaatggtaatacagtagaaataaaaaatatagccacttatccagaagatcaaggtaaagggtatgctaaacatttgattaattttattgctaagaagtatcaaaataaatatcaaattttgcaagttggaacgggtgatagccccttaactattcctttttatgaaaaatgtggttttaaacgctcaggtaagatcaaagatttttttgtaaaaaattatgatcatccgatttttgaagctggacatcagctagtagacatgatttatttaagtaagcgattaaattagaaagtaggctttatcgatggaagaaaatactaaaaaaatgttggcaggtaaaccatatcgcccagatactgaagaactgaaaaagatttccagtttagctcatcgcttatcacgtgattacaacatgactactgatgaagatgaggtagaacggaaagcaattatcgatcgtctttttccgaatcatggtcaaaatgtatatttacaaggaccaattgaagtggattatggccaatttacacacttaggagataatttttattctaatttcaatttgactattttggatacttgtcccgtaacaattggaaataatgtaatgtgtggacctaacgtaacatttgcgactccattgcatcctttgttgccaactcaaagaaatgctcgcaagcaatcagacggaaaaatagccgatattgaatatggagcagctatcactgttggcgataattgttggttagccagcaatgttactgtttgtcccggcgtaaaaattggtaaaaattgcgttattggagctggatcggtagttactaaagatattccagataattcattggcactaggggtaccggctaaagtaatacgtcagattactgatcaagatcatttaaataattatccatattagaaaaagaaaatgtatacgttctcattgattctttatcaaaattgtaaccccaatgaaaaaaataaatgctaatattatgggtagaatttacataacattgctgggggaatttaaaacgaaacgtattaatttaaaaaaaacattaatcaaatcaaccatttggttaactatagctgcttcaatgcctgttggaatggcaattgctaatgccaatagctcgacagttcaggcagcaagttataacaaaactgaaatgcggagctttgttagaaatacattagctagttattatgctcgtggtaccgtagttatagtaaaagatggacaaccacaacaaatttcttatggttatggttattatggcaagcgattaggtgcgggaaacagtaaggtagtttatcctgtttgttctttgcaaaaagtaattaccggcgcaattatcactcaattaatttctgcagggaagtttacacagtatactaagatctctaagtggtatcctaatttaaaaggtgctgataatattaccgtcggcaacttgatgacgcatacttctggattgacagcagctgatactgaagtaaatagaggacgtgtttattcagaagctgatgcaattaattgggttgttaataagctaaactcaactacgcaaaatcaacctggtaatttttcatacaataataccaactatattttgttagctggaattatacgtcaagaaactggacaaagctacaagcaaaatgtgcaggaacgaattattaataagcttggcttaaagcgaacttatttcttggaagatattccagccgggatgacggatggtatctcatatacctggaatcaaaagaattaccaatgggctcaatatgttaaaaagactcaagcttctcaattggtaggtgctggtaatttgttctcagctccaatggactattaccgtattcaacttggtttaaccaatgggcaaattttgagtcgaacagactttgattatatgactcatttaacatcacgttcatcaaatggttattcaggtggtttatatatgaagaataatgataacttgaagttagcatatggtaacttatataatactcactttggtaactggattcagatgactacagataatcaaaatggtttgattatgttcttaaatcaaactcaaaatgatgaaaacagaaataaacaaattggttatcaaattttgaatcatatcaaggctaatacatttagcgcaaaataaaatttttcatgctttaaacttcatgttaagcttaaagcagggtttttttgattggagtaaaaaagatggttaatggtggcgtattagttagccaagatttatcttgtgctggtcaagtatcacttagtgcagctttacccgttttaggagcatgtggcttgagcccgaccgtattgcctactgcaattttgtctacacatacgggtggctttggtgagaatacttttttaagtttgaataatgaaatggctaagattatggcccattggcaaaaggttggttttgatttttcagctgtatacttaggctatttgggcaaaagagcattagatttttggacagaaaagattagctattttaaacaaaaaaataaattgatcttgattgatccagtaatgggtgatcacggtcaactttatcgtggcattgatgaaaactatgtaataaagatgcgaaatctagttaagtcggctacgattttaacgccgaatatgacagaagcagcatttttattaggcaaaaaggcaactagtaattcattgaaaacagcaacagaatttgcggctgaattatctagtcaatttggtgtctcgaatgtcataattaccggtatttcacttaataaggaaaaaattgcggaagttggaattacagccgatcatagttggtctttaattcagaaaaaactcccaggtaattattttggtacgggagatttgtttgcaagtgcattttttgctgctttaatgcataaagaaaatttagaaaaagcgtgttcaattgcggccgattttgttgcacaagcaatcagggaaacacccaagcaagattcacgtctaggaccaaattatgcagcagctttaccagatttactgaagagatggagtaataattaataatgcagatatttagagaaaacaagaattctttacaagctttagttttaacgggactttttgcggcaattatttatattgggatctgggtgttaagaatccccgttcctgctatggtaggacgcccatttattcattttggaaatacgctaactgctgtagcaattttatatttaggttatcgtaatggtatgattgcgggaattattggtctaggtggttttgatttgttaaatggctatgccgcaacatcatggttaactatgcttgaggtagtagtagtggcttcggttttgacagcagtttatcgaggaatgcactatcaagatagtaaaagaaatattattattttaggtattattgcaggggtaactaagatattcactacttattgcgtttcaattgttgaagctttaatggtggggacgagctttaaagtagcgttagttggagcctttgttagtttgcctgcaactgtaatcaattcaatttctactgcaatttgtacaccaattttatattttgctttgcgggatgctagtcgtctaattataaaaaaggttagataaatcaatagattttacacgaaatttgcaaggtgctatattaaagatattattactggcataaaaggtaggatagtatgaacgaagacctaaagaaaaagaataaacgaaacaatattattattttaacgattgcagttttaattatcgttggagtaatcgcgggttttggcattcataatcaccgtgtggcaacacaagctgcagcagaaaaatatgctaaaactcactttaaccctaatgttacaatcgatggagttaaagtaggaaagctaaccgttactaaggcaatggctaaagttaaccaaaaagctaaaaatcaagttgagttaaaaaataacaaactggtttatagctataacactacagtccaatcattagatgagtccgagacaaaggccttttttaagaagcaacaaactaaaattccatcgactcagacttataagtttactactagtaatttagctacagctaaaaagaaactaactgacttaagcaaagcagagattacttataaaattaatggcaaaaactatcaattaaaggccaaagatttattgaataatgtgacttatcgagataatcgctatcaatttggtgatactagtaaattaacgactaagttaaatcaaattgataaagaagtttcaacattacacaagagctataaatttacagtgccaaagggcaataaagttaaaggcaaaaccataacggtaaagaataagacttggggttggggcgtttatgttaaaaagacgcaacgcttacttctcgaagcatttgccaaaggccaaaaaaattttgatggtgcagatgcactttacggtttaggctacagcacttatcctcacggctatggttattcaaataaagagattggtgatacttatgctgttgtatcattgaaaaagcaagaagtatggctgatcaaaaagggtaaactagccgttcatcttcgtgatgttgttaccggtactatggaaggttctaagggtgatcaaactccgcgtggggtgtggtatatccactataaggaatcaccaagtacattgcgtgggaccaatgatgatggttcaagttatgcttctccagttaagtattggatgccatttaccttaagtggctgtggttttcacgatgcctcttggcggactgattggagcaagaccgcttacctaaagggtggctcacatggttgtgttaatgttaaaccaagtgagattcgaagcgtttggaacaatattaaaaagggcgaacctgtaattatttacgaataacatgtttaagggatccattaagttggatccttttttatgaaacaatttttataaagtgaaaagctatttgattacttggaaaaacagctaaatgtaaacaataaacgtgaaacatggctctgaagcccgatattaccgcgattgtggataaaaatataggtaattcacatctattactaactcaattaatatttttttgaaaaaagagtagaaagatgaacctttgtttgatataatttttatgcgaactaatggtctaaaaatagaaagatgagatgataatagctatgatgcaacaagaggaattagaatcacaggaagaaaaagttaagttttttgatgaagactggttgaattggaactaaaatctttaaatgtataattcacttctgtataattaaagaaaaataaaaatttattaactctttcacctaaaggagtaaattatgcaagtaagaactagatgttttcaaagtttagattacgaagatttgtgccgggttcatgatgcggctcgtttgcaagaaatgaaaataggcggagtggagaaatattttattccgtttaaggaagcaccatactggtataatttctttgattctgagattaggattgtagaagttaataatgaatttgctggctttgctgcgtataagccacataatttagcttatttttatattgatcctcaatttcaacgacgtggtattggtgatcaattgctagcttcagtgttaccaaatattagacggccgattaggctagaagtctttagcgcaaatatagcagctaaagcgctgtatgcaaagcatggttttaaaattatcaaaacagttaaagagtcgtggtggtcagaccccaagtctgagccagtttcaagtgatacgatggaattaatgtaagaaggaatatgatatgagtttttataatttagattatgaagaaaaacggtttattcagttagctaaaaagaatactcgctcatattatgaacatcatgatcagattccttcctcacctggccaagttgagctggccaaggaactagtaaaggaaatgaaagagcttgggcttgatgcttactataatgaaaaaacagcttttgcaattggaaagttaagtgcaaacacagcagaaaaggtaacgcctattggcttctttgctcacgtggatactgcagactttaacgcagttaatattaagccacaaattcacgaaaattatgatggtcagaaaattatcctagatgagaaagataatattgttcttgatccaaccgagtttccagacttattaaatctaaaaggacaaaccttaattacttctgatggtcatactttgctaggagttgatgataaggctggaatcactggggcattagcaatgcttaaatatttaactgaacatcctgaaattgaacacggtgatgtttttgttgcttttggtccagacgaagaaattggctgtggtggtcaatattttgatccagctgattttcctaatgtagaattcgcttatacgttagacaatgggcggccaggagattttgaatacgatacctttaatgcgtcagagattacgatccatattaaagggactgtagttcaccctggtgaagcatatggtctgatggttaacgcaacaactttgatgaatgattttttgtctaatttacctcaggatcaagtgcctgaaaagtcacgtaatcatgatggttatttcttggttctacatgctcaaagcaatgttgatcatgctgacattagcatgattattcgtgattttgatcaaagtgaatataaccgtaaagaacagtttattcgcgatctagttaaaaagatgaacaaaaagtatggcaatagatttactgtaaatattcgtgaacaatatgaaaatatctacaactatattaaggacaagccatatattgtaaatctggctcttgatgcttatcgcaagtctggactaaagccaaatgtacaatcctttagaggtggaactgatggaaactttatttcgcctaaaggaattcctacacctaacttatttaatggtggtggcaattatcatggccgatacgaatatgtgactgttgagcagattgataaattagccgaagtgttgactaatattgtgactgaacatttgcgtcaaactcgcactggtaggaatgaaaagccactagaaaaatattggtagatttaatagccgctttatttaacaaattaatactgtagcattaggatataagtggctagatgaaatatccttcctccttagaagtgataaataccattttcttcattgataatcttgctacatattgcagtgacgctgtatttgcgccgctgcttttttgttattattggtaataaaatacgtaaaaagtacgtaaagttttttcgattagcatttaacaaataacttaaatagaactaccatataggtggctggacgagaatcttctctcgtagaagcaattaataaaccaattttcttcatttataatctaaccaaaaaggacagggatgctcaattgcattgctgtcctttatttttgataatcttcgccgtaaatataacgatgtaattttaggtattgctcatataatctgcgttcattttgattgtcttttggaaaataatattgtttgcctttgagtcccttgggcatataattttgcttggcgatttgatgcggagcttgaaaaggtgactcagctaggccagctcccgtgatttctttagcgtgtttataatgaaagtcacgcaaactattaggcatgggataccgaatgggatgatcactatcttgatcaagtctttcccaaatttcctcaaatgctcctgattttggcgaaatacacattaacattgttgcaaacattagtggatatttagctttaggcattcctatcttttcagcttgattagctgcagtaacaatttgagttacttgttgcggattagctaagccaatataagtatatggaatctcacgcagacgccgtacaaccgaagctaaatctccattttttagcaaaatagcaagataataaagtgcagcatctgtgtcagagccagccatagagtcagaatatgcagctaaataatcgtaatgtttagtggctttcttatcatagctaaagaattgctgcttagtaaacgatttaacatttgctaaggtgatctttttaggattaagtgcatgaacagtctctaaaatgtttaaagcaattcgtaggtcgccatcagctgcggctgctatcaaatttaacgaatttttttcaacttggtgatctactaatttaaggaccttagtacatgccttgttcaaaacagctgcaatatcgtcttctgttagaggattgaactcaaagatttgacaacgtgaccgcacagctggcacaatcgacataattggattttcagtggtagagccaacaagtagaacatgaccattttctaaataaggtaataaaaaatcttgtagatttttggtcatacggtggatttcatcaattaaaagaacgaaggtctgatacttataagcattaataatgttgttcaactgtgctttattatcaattgaagcattaaaggaagcaaagggataatcattctctttagcaataatttgagctaagcttgtctttccggtaccaggaggcccccagagaagtaaagaaatattaacatgctgcttgataatatttcttaaagcctttcctggtcccagcaactcactttggcctaccatatccgccaatgtttgcggcctcatttgttcggcaattggtgttttaaaattcatcaaattccttctttcagtaaggtaagtatactattttctacaatttttttgtaaaaatagcttgtactatcaaaaagtaagttatataatagaactaatgtacgagaagttaacgagtttttttagaaagaggcgtattgtatgattactctttatatgtcaacaagtagtgcatcttcacgtaaggcgagagcatggcttaacaaatatcatctttctttcaaggaaaagaacgtctttaaggaattatctaaagaagatgtccttcatctgttgtctttaactgaaaatggaactgaggatattttatctactcgttcacagtctttcaaacaattaaagaataagttgaatgaagacttgtcattgtctaaaatggttgctttaattactcagaatccaggattattaaagagacctattattgcagacgaccatcggatgcaggtgggctataatgaagaagatattcgtcagttcttgcctcgtgatatcagaaaagctgaattaattgaggcacaacggattgctgatgctgcttaaataagacaaaaaacgatgaatttacctttgtgggtgattcatcgttttattttgctctaaatttttatttagctgaacctgggcgttgcttcttggctacttttttacccatagtcatgttgtcattatatccccatacccaaactgcaataaatgaaactataattgaaacagcactggcaattaggaaagtatagaaactatttagttgagtaggatgggccgggttgaaaaagcttgagaagccaattagaccaccggtaaagccatacatagtaccatgcattaaaccagtaactaggccaccgaaggctgagccaatacaacctgaagcaaagaccttcttatatcttaagttaatcccataaatagcgggttcagtaacaccgcagaaggctgaaatagctgctgcaattcctagctctttcatgtctgctttctttgatttgattgcgactgcaagaacagctgcaccttgggaaaccattgttgcgcagataattgcgtttaatgagctttgaccagttgaggcaatttgttgagcaactagtggcacaacgccccagtgaagaccaaaaataaccaataactgataaaaggcaccgattattaagccgccaacccagccagatgcagatactagccagttaataaagactgcgataccatttgcggctccttgaatgattggaccggtaataactaatgtgatagttgaaactacaaggatagtaattaatggggtaaagatcatttgcaagtaactaggcaaaactttctttaaccactgttcacattctttagctagccaagcagctaaaatcattggaaagatagagtaggaatagtttaagaattggaagttccaagatccaagactaaacattgtcgtcatactcttgccccaagtaatcatttgtggataaactaagaaaccgccaattactgcagcaatcattggatcggatcctaaccgcttagcggctgcaaatcctactagaactggtagaaagaagaaagcagagtcggccatagcactaactgtgacatagaccggactcttgacgctaagtaaagcaccaagttgtggaagggtgagtagtgcaagtaagcctttgatgatacccgatgctgcaataacaccgattacaggactcattgagccggtaataaaaccaattagattactaaaggctctagaaacaggatttttaccatcatcctgattattagtttaaggtgaaggattgtcactaagaccaggcaattgtttcataactgcatcgtaaacattggtaacctcattaccgattacgacttgatattgaccaccagcatgcataacgtcaagtatgccacgttgattttttaaaatatcatcattggctttagactcatctttcaaataaaagcgcaaacgtgtgatacagtgaatcaggttatttatattatctttaccaccaacattcttaataatgaaagtagctaattcatcatacgaaagtttcttgtctgaactatcttcttttgactcctttaaataagctcgagcaactgtatcgccagcttctgctttaccttcagttacatctaagccatcaagtttcatagatgaattggtgattaaagtcataatcgtagtatcaagatcttttgctttaatcatctctatattcatcgtggcaatttggtcaccagctttaacttcctgaccatttttaattactacatcaaacggttcacctttaagtccaaccgtatcaactcccatgtggaccaatacttctagaccatctttagtagtaattccgatcgcatgctttgtttcagcaatcattgagatagtgccgctaactggtgcaagaactgtattatcagttggtgttaaaccaaaaccatcacccatagttcctttgctaaagataggatcacttgttttacttagtgcaattacttgaccattagcaggagcaagtaatgcaatttcgtttttattcataagtgttattcttcctttcctataaaagcgttttcacaaaattcatttattataatattcctgtacgtacaagttgtcaatagatttttatgaaaatgattacatgcctgcaatatagtttttagatatatctattgacatgtacgtacatcaaaaatataatgaacatgattttaagaaaggacaaggtcaagatgactaaagcaaaatctgaactgatcgctcaagacttagcttctaagattaaacatcaacaatttaaggaaggcgagcgcttgcctagtgaaaatcaattgacagagctttatggcgcgtcacgcgaaacagtccgtaaagctttgcagcaattgacctcgttaggattaatccaaaaaatcaagggcaaaggttcgattgtccttaatttggaaaagttttcgtttcctatttcaggaatttctagctttgcggaattaaataaatcattaggaatgaatgcaaaaactaagctacttaatgatgaaatggttgatgatttgccggcaattttcaagaaattcttccctgaacaaaagaagcatgctgggatctatgttgaacgtttaagaatgattaacgatgaaccagaagtgctggactgtgatttcttatttaatccaccaattactgagctgccgccagaagaagcagaaaaatcaatctacaattatttagaaaataaattagggctagatatatcctatgcaactaaggcaattacggtagaagaaatcgatgctgatttacaagagaaattgcaattggatagtaaggaagcagtactagtagctagtcataattttttagcagatacaacgctgtttcagttaactttatcctttcataatcctaaaaagtttaaatttattgactttgctcgtagacagaaaattaagttataggagataaaaatgacagatttaggcaaaaaagtaatttaccaaatttatcccaaatctttttatgattctaatggcgatggagtaggtgatattccagggatcatcgctaaaatcgattacatcaagaagcttaacgttgatatgatctggtttaatcccttttttgtatcccctcagaatgatggcggttatgacattgcggattattaccgaattgatcctcgctttggcacaatgtctgactttgaggaattaactaaaaagctaaaagaaataggcgttggcgtcatgttggatatggtgctaaaccattgttcaaccgaaaatatatggtttaaaaaagctttggcaggagacgaaaagtaccgcaaattcttttacttaagaaaagctaagcctgacggctccttgcctaataattggcaaagtaagtttggtggaccagcttgggcaaaatttggtgatacggattattattacctacatttatatgatccaactcaagcagatctcgattggcataacccagaagttcgtcaagaattgttcaaagtaattaacttctggcgttcaaagggagtacatggtttccgttttgacgtaattaacgtgaccggtaaggatgaaaagttagttgattcaactggtgatccaagtcaggaaaagagtctttatactgatacagcagtagtgcatcaatatttgaaagaaatgaatcgctctacttttggtcaagatcctgactcaattacggtgggtgaaatgtcttcaactactattgctaattcgattgagtactctaagccgagtgagcatgaattgtccatggtctttactttccatcatttaaaagtcgattataaaaatggtgaaaagtggtctaaagagccgtttgatttcatgaaattaaagcacttatttactgaatggcaagaaaaaatggatcaaggtggcggttggaatgctttgttctggaacaatcatgaccagccgtgggcccttaaccgttttggtgatactggtaaatatcgagagaaatcttccgaaatgcttgctactgcgatacattgtatgcgcggaactccttacatttatatgggcgaagaaataggaatgatggatccacattattcttcaattcatgattatgtagatgttgaagctaaaaatgcttttgcggcattgaaacaaaagggaataagcgatgatgaagcatttgcaatagtaaaaactaaagcacgagataactctcgtgtgccgatgcactgggatgatagtaaatttgctggctttagtgaatcaaagccatggcttttaccaacagatcaagatagaattaatgttgaaaaagaattacacgagggtgaaatttttgcttactatcaaaaattgatcaagttgcgtaagcacgaacaactgatttctgatggccatattagaatgtttttaaaagatgatccacaaatttttgcctatgaacgttttttgaaagatgaagctaaaaaaatattagttttcactaatttctatggtactgatcatgtagcaccattgcctgaacaatatcaaaataagaattatcaactcgtattgagcaattattctgcacaagatggcaaactaggagagaatatctcattgaagccatatgaagctttagtaattaaaattaattagactagtataattaattgtgttaaggtaaaaatgttcgtgaagatttcgatttacggacgaggaattcgcgagaagtcatgattttcaggtcatggcttctttttttgcataataattaaaattatgtaaagtaattgacagcttgcttataatagatagtagagagaaggaaaaacgatgttagttgattctgatagttttatttcagttgaaaagaagctaatcaaacaaggcaagttgcaaaaatttgaaaaagaaaatggtccagttaccagtttaatgatgattagtaaaggaaaaattgcggacgatatgcgttatcagttagtcgagaacttggcacatcatccattacatatagtctacaaggcctcatttgatcaatatgatgaaaccctgaattgtattttcgatcgacaaactaaaaagccaatcacaggtttatggtacacgccgcaaagaagagactttactgaaccgcctaagaaaatggtccagctttttatcagtgaaattgtaaataatttgactgattcaacaggaatagatttgccaatctgggtctttatcaatgataaggcacatttggcagttactaagaaagatttgagttaagaaaaaaatcagtgcgaaccctatgtgaacataaaaatgagggagtttcgcactgattttgttttgtattttatgtgttaactcttctttatatacttttgacatagtataatagttgatgaagccaaatatttaggattggatgaaatacatttgccccagtcaaaagtaggttctttgcacgtcgcactctatgtgagtgcttaaattaaattcaactcttgcaaatgcaaaaaagcatccctaatcaaaatagagaagagggatgcttttttaatatcattattgacgccaagcgctatctaatttttgttgaccagccttaatttgagcattaacattttgatgcttatttgcagcaattaaaatattttccataatttgattcataccattataagcagagtcagaattcttagctacaggaacactgtagagatgcttcattgaatcctttaagacacttggcaatttcatcttgctgtctaagtattccttactatttaagacattatcgttaacaggaatatagccagtctcattagcccaagttaattggctagatttgctagtcaaaaacttcatatatttcatggcagcatttttttgtgcttttgaagcatggttaaagacataaagatcagtcccttgagaaatagtgtattcaccgggacgaggagcaacgccgtacgtaaacttgttgcctacacccatcttagtgtagctttcaccagctgaagtaccgatgtacattgcgactttttcattagaaaaaggaccggagaggtaacgttcactaccagcagttctaaagtagccattgcgtacgccatctgcgtagaagttaataattttcttagaggcagccgaatctaacttgattgaacgaccaaaagtttgtccttcattcttgagacctagaacatagtagttggctaagttatcaaaaccagcaccaacaattttatggttggacttttcataaattgctttagaaacagacttaagttctgccattgttttaggtacctttaaaccatatttcttaagtaaggtcttgttataagtcaagacttcaatagatttgttgaagggaataccatattgaacgccattaatttgcgcacccttcattaattcaggacgaatattagatttggctactgagccccaaccataagttgaattattaatgtatggagtcaaattgaccaacatcttattttgcgcagcttgataaagccaaccaggataagcttgagtcattgttggtaagttattaggattttgttgagtagaagtaattttcccttgtaactgagggtaattaccttgattttctagcttaactttgatgttaggattttctttttcaaatttattagtcaattgtttcaaagttttttgttgtgcaccattcattgcgtgccacatagtaatttctgtcttactatttttagcagatgtagtgctcttttgatttgaacaagctgctaaaaataatgctgcagtagttactgcaccaattgataaatattttgttaagcctttctttgtcatcgaattctcctcactaaaaataacattaataaaaatgaaatttaaaatatatttttattttaataagcacaatatcttgtatcacttattaactaatgcaagataatatactactggctaaaaaataaaattcaatccttgactttttgccagcatttataagcattgatatatcaacgactgtttacttaataaaaatattagtagcaagagaaatttaattaaaaacacattttattaaatacaatatcttgtgtatgataaatgtaagaatcaattaagctaaggcaaaataatagctattttatagcaaatatcttataattaataatgaacttaagaaaagaaaggtcgaattttatgaaaaaattagatactactaagcttactgatgaacaaattgaattttttaactcacacttaccatacatggcaactgtgaatgctaacggtgtgccacaagttggtcctaaggcttcacttaaggcaattgatgcttcaactattcaatatcttgaaaagactaagtcaactgcttatgcaaacttgaagaatggttcagtagcagctattgttgtcgctgatgttcctactcataaggcatttcgtgttttaggacatgctgaaattcatgaaggcgacgattacgctaagaagatcgtttcaggcactgatactcctgaagcattcgtagttaacattaagatcgaagaaatcgacgcttaattcaatattttatcgcaatgaggcatccctagcagggatgccttttttgttggtataatgatgagtagttaaagtgaaaatagatttttgaaaaaggtaaattgtgattactagtaaaaagaagccaattctttggttattatcagatacacatctaattgcagatagtttacatgatgatggtcttgcttttcagcatatgcgcaacactagtgcaggtaaagacttagattatcaggagattgctttgaccgcgtttgtacgtaaagtaatccaagagaagcccactgcagtgataattactggtgatgtaacctttaatggcgctaaaatatcaggagaacgtttagctaatatttttaagccattaactaaaaataaaattgcattcttagttttaccaggaaatcatgatatttttgacggctgggctcgcaagtttaaaggtgatcatgaagattacaccccgcaaattagcccagctatttggaaagagatctttgctgattcttatcattatgctttacatgaagatcctgattcactggcttatagcgttaatctgaataagcagtatcgactaatattggctgactcaaatatttatggcaagcaggaatcacaaactcatctgattactaacggtcgaatttcagaatctcaaatgaactggattgaaaaagaattaattgatgcgcagcaaaagcagcaacaagtgctattctttatgcatcataatctgtatcgccataataaagtaatctatcagggatatattcttgataatgcacttgcactgcaaggtttattacaaaaatataatgtaaaagcagtcttttctggccatatgcacgcacagaatattattggtccgtttgctaatcgaccaattgcggaggtagcaggagcttgtttttgtatgactaagcaggaatatggtcagctatatttagacgaagcggggatgcaatatcaggtgcattccttcaaaatggaatcgtggttaactgcggaagaaaagcaaaaagtgccaacagatttttcgcaatatttgaagcatttgttttttagtttggatgaaaagcaactaaatcagattgcgcaagctttatcagataaaaatgatgctaacgtggtcataaaatttatagatcaattgaattggaacttttttgtaggtgaaagtaattattctgcagcccaaaagaaagaaattgttaattcacgagaatatcatttgattgccaaatatttacctggttttaagcgctacgttgattcatttttacaggtagagcaaagtagccataaactgaagcttaagtggtagtgagattagttgctgtaaaacggaaacttctattatgaaaaacgatacagtagaacaaattacgccgagatcggcctctaagtctgttttaccagcaaccggtaggcaagatagtgatctttcatggttagggttattactgtctggcttgagtttaagtggattatggactcgtaagaagaaaacaaaataaaatcgaaagagattgagacactgggtttcgatctcttttttgataggctcaatatcaaggaataaataactataactgctataatgatgatatgagtactaactgatcaaatcttaactgcatttattagatcgaaggttcattatgaaaatcaataaaaaacttatcttaatttctactgcgttattggctgtgtctccaattgccgcagcaccactaacttcaaacgttcaaacatcagttgccgcagctactaaaagcaatgcaactggttccttaaaagtcattgattcacatattatgttgtacaatcgctcgggcaattatttggatcatatttctgcacctaagaaaggcagcacgattaaatactatggaaaaccattttttaagacggttgatccaggcgactacagtgctggtgagttatactatcctttacgcaagaatgtttatatttcttcagattatgtaacgccaatatctggccctgcttatttaacggcaatttttaatgccaatatttacaataagtctggcaaaaaagttggttttgtcaaaaagggtagcgtagtcaaatatgctggtaagcggaaaactactagtagtaaagcaaagtattattatgaggctcaaaaaggtaagtatcgcattccttataccataattaatggaaaagactactattatttaggttccggtcgttatatcaaggtggccaacatcggttacattgacggctatcgtcttactactcatgcaccaattaccgtaacggtcaataagaatacttcaaccattacaaagtatgttaattcaacaggttggggtacagatccaaataatattgaattgaagaaaggacaaaagatcacagttgattatgcgggacaattcccacaacaattgacagactttgatcatgatcactattcatactaccggatcaagggcactaattattgggtatcagaagatgatctgaatttgccacaagctttagagaatcattcagatcttgaattggccgattctaccaaagttgtcttggataaaaagattcctttgtacaatgttgacggtgaaaaaactagccaagagctatctaaacagttttataccaatacggttgaagaaactgcaatgtatagcaaccataaaattaacgaagccctttatctttgggtgccaagtgaaaagaaagccgaacttttctaccatacaacaggtgaagttaatgctaagactaataagttagataatgaaggctatatcttagctagtgatgtcaaaaaggttgaaggtgtgaagcttacaccaataaacacagctggcgaagcagagtcacttgctaaagtggcaactaacaaagcatcgttgactgctgcaatctccactgcagaaaatgtgcaaaagacagatcgctatcagttagctgattatgataagaagattgaatttacaacttatttacagcaagctaaggctattgctagtgatgcagatgctagtgaaattgcagttagtcaagcagaaaagtttttaactaatagcaccaaagcacttgatggtaaaaaattacttgttagacgaactgaccagttaactacttatgaggttcaaaaagtgttgaatcttatctacaattactatcagccgcaagttacaggcaaacttaacgttcaactttataacagcaaacgtaattggcaatatccaacaactcgtccagtatgggatgttaccaagaagagtccattttggtttggctattcttcagataccattagaaagcgcaaagtcgatattagcccattaatcactgatggcattactgttggcaagaaaaagaaattgcaaagtaatgcatacgtttataccgctgcaggtgtgaaaactagaaagctgttgaagaagaatacttcttataagattcaagccattacaactattaaagggcaaaaatatgtcaagattggtgcaaataaatacgttaagtatggcaacttcgaagcatctaagctaaaagtggtcaaacgttactacactgtccaaactgtaacacctgtggtaaatgcccagggtaaaaaagttgacgaaatcaagtcaaagaataccaggacaaagaattatgtccaaacttatggcaccaagaggatcaaaggctatgattacattaagataggtagtaatcgctataccaatatgttgggatttgaatatgttttagcgaagtagggttcgattgattatttagtttatgttaaaagaagcactgtgttggtgcttctttttttgtacctacactacttgttattaaatggggcttcggggtagaataaaactatatttactttaatatttagaggaaaaacaatgtctaactttgaaacttcacaaaaagattatcaagaatacgcaaaattggcttccagcgctgaaagcttaatttactctgatcctagaagtagtttgacagttttcggaacttttggtgagcaattaactaaggaaatcatgcatttggatgatttaggtgattgggaattaaaccaaaaacaacgaattgaaaaaatggcatattctaagaatgaatatccacctactgttttgaatgctcttaatttgatcaggttaagacggaacaaggcaacgcatgacgatcattttattgctacccaaaagattgcgcttgaaattgatcagagtgcttatttggtatggaaatggtttttagaagtttattctctggataaagttgcagattatgttgagccacaagatcaaaaagctttaattaaaactcaagaagataaaatcaaagctctcgaagaaaagataaagcaattacaacaaaatagggtgcaggaagtcataatttctcctgaagagcgtgaacgcagacgccagattaacgttcaatttgctaaaaaacatgagttaactgaagcagaaacacgtcagttaattgatcaacaattgcgagatgcgggctgggaagtagattcacaaaaattgaacaattggacgcagaaaactgaaccgcaaaaaggtcacaatatggcaattgctgaatgggttctacctaatggtcagcgagcagattatgcattattcaaaggtttggagttctacggaattgttgaggccaaaaagtgggaccaagatattgtagggcaaatggcacagcctaaggaatattctaaagaggtaccgtttagatcagattatcgtctagtttcaaatgaaatgggtgattacaaagttccattcatctatactgcaaatggtcgtccatatcttaaacaatatcaggaaaaatctggtatttggttctgggatgcacgtaatcataaagaaagcgcatatgctctagaggaatttcataagccagaagatttatcgttgaagctttctgctaaaaataaagaagaagcaaatcaagacttggtagatgatcaagattttcctgattttgcacatcgtgaatatcaaattgctgcaattcaagcgatggaaaatgccatcaaagatggaaaaaagcgtattctgcttgccatggcaacaggtactggtaaaactagaacggcaattgctttgatgtacagactacttaagcataagagagctagacgtattctttacctagttgaccgtaattcattgggaaagcagactgccaatgcaattaaagataataaaataggtacgatgtcaatttcttccatttatggattaaaggaattgagtgataaggcacctgaaatatcaacaaaaattcaaattgcaacggttcaggggatgatcaaacgcctatttttcagtgaagacagtgatgataagccatccgttggtcaatatgatttcattattgttgatgaagcccaccgtggttatgcagaagataaagagctcagcgataaagaatatcaattctatagtcaagaagattatgttagtcaatatagacgtgtagttgattattttgatgcgactgctattggaatgactgctacgccagctttacaaacgattgatatttttggcaaaccggtgtattcgtatagctaccaacaagctgtcctcgatggctggttagtggatcatgatgcaccagtaattattcaaactcaattgtctcaagaagggattcattttaaaaagggtgccgaagttagtctttttgatcaggatgaaaaaactatcaataaagaaaaattacctgataatatgaattttgatgtaaaagactttaataagagagttatcacacgtagctttaatgaagtagtttgtgatgaattagctcaaagatatcttgatccaaatgatccaaatttaggtaaaactttaatctttgcggcaactgatgaacacgctgatatggttgttgacttattgaaaaaagcattcaaaaaagtgagtaatcctgtagatgacgatgctatcgaaaaaattactggttcaattcggcatcctaatcaagaaattaaaaactttaagaatgaaaccaaccccaatattgcagtaactgtagatttactaactacgggaattgatgtaccgcaaattactagtattgtcttcttaagaagagttcagtcaagaatcctctatgagcaaatgttgggacgggcaaccagactttgtcccgaaattaataaatccaaatttacgatttatgatgccgtcggaatctatgaagcaatgaataaagtgacaaacatgaagcctgttgttaaaaatccaggacataatgttcactacttcttaaatcacaaggatgatttctttgagacaaatgaggattccgctcagtatcaagtagatatggctggtgccgttgagagaaaaattaaacgtttggatgatactaaacgtgatgagttccaacatctagctgagattaattcggttgatcaatgggcccgtgaattaagtaagttagataagtcccaatttttaaagcaatggcctaagtttgagcagttagatcacatcaaacctgtcaaacccaagcaaataatatcagacgcagtagacaaagtaattaatgtaagtcgaggttatgggcatggcaatcaaaaaccagcggattatattgaaaacttcaataaattcgttaaggaaaacgtcaatactattccagccttacaagttgtagctactagaccgaaggatttaacttttgatgaactcaaaaatattaaacttaagctagagcaaaatggctttaaagaaaatgatttgcaaagtgcatggaaaaacgttaaccatgttcagaccactgccgatattattagcttcattagacaagctgcggctggatctgagttggtggatcatgatgttagaattcataatgccatgcaaaaagtttatggtttagctgattggactattcctcaaaagaaatggttgaagagaattgagaaccaattaatttcatctactgtattggggccaaatgctgagaaagcctttgatgataactatttctttaaacgtcacgggggttataagcaaattaagaagatctttccagaaaatgctgatcagattatttacgtgttgaatgagaatttatatgtttaaaaatgccattactggtattttttgcttttaatcacgaaaagttgtgataaaaaaaggcgtgtgctaaacttaaattaacacggaggaatacaatatgttaatcgagttcactgttaaaaattatgcttcttttagagagcgcactaccttgtctgcagagacaggcaatagactacgtaaattgaaagaaactaatactttctcaagtaaaaatccatcattattaaaaagcttactgttatttggtccaaacggttcaggtaagtctcaattgattcaagctttacaaacaatggaaggaatagtaacacgtccaactcaagccgtaactgataagttaaattattatccttttttgtttgatgaaaagtccaagattgaagatacttactttgaagtgaagcttgagttaaaaaacaaaatttatgactattcatttagttacaatcgagagagcattaccagtgaagcattaaccttaattagtggtaacaaggaaaaagaaattttttctcgaaatggaaatgacattcaagtctctaacaagcttttggaagacagcattcctaagcttagagataattctttattcctatatttagcacaatctgaaaatgatgcagattgtattgctatctataagtggtttgttaatgatctgatttttattggcagcggctatccagtaaatattcctgacgaacttttaaatttgatggaagatgaatacctcaaaaaagaaatgatctcattcttaagttttgcggattttaatatctctgatattagaattagagaagtacctactaatccgttgaatccacaattacaaaagattgtagagaatttaaatattgattatcctaaaacaactaaagaactatatacggttcacaagatttatcatcaaaatgaagttattaattctggggaacttccattaacacaagagtctgttggtacacgtcgtttattttatatagtattagcaatgatgcttgctcaaatgaatggtaacgagaagacgattgtaatcgatgaatttgatgattcactgcatgttgaacttgcagctgctttagttcgtatttttaattcaacagaaaatttgaatcagtttattatcactactcatgatattcagctattagacagcgatttaagaattgatcaaatttatttattagacaaggattttcacggaattagtgatttgaaatcaatctttgactttgaagatgcacgtaataaaggtcgacatgatatttcgtttgctaagagatacttacaaggccgattcggtgcagttcctgtaatagatgtagatggtttgctagatgtattgcaaatgattcatgaaaaatatggggatgagcatgggaagaataagaaataagactaagtctaatccaattattggaattctgtgtgaaggtgaatctgaaaaacaatattttactatgcttaagcagaaatatcgtttagcaaatattaaagttaaaatagttgctgcagatttgtctggtaaaagtctagtagaaaaagcagttaagtttggcaaatataatcatttagataaaacttatgttgttttcgatagagatgagcattctaaagatgaattaaggaaatgcgctaaacttgctcgaaaaaatgatattactattatgttttcttcaatagactttgaaatttggattttaatgcattttgaaagtgtcactcgttcttatactagaaaagagctagtacagaaactgtctagatctgcctattttaatcaagattatagtcgctttaaaggtaatagttatcgagaatatatttttgataaagtgcaagatgcagtagatcacgccaataagttgtatcggaaaaagagtgactggattaatgatgatccatttactaatattcaaatatatctaccggaaatcttcaaaagagacaatttttaaaggagcaaaattaagtgaacaatcaagaaatcgttcaaaagttatggaatgaatgtaatattttgcgtgatgatggtgtcagttaccaagattacattactgaattaacttatatcttattcttaaaaatgagtaaggaacaaggtgaacaggatgatatcccccaaaaatatcaatgggataatcttgtttcaaaggaaggactagagttaagtaacttttatcgccaattattacttgatttaggtaatcctgaagtggttaatagtccaagaatcaattcaatttacgctgatgcttctacttcaattcacaaacctgctgacctggaaaaaataataaaagatattgacgcacttgattggtggtcagctcgtgacgaaggccttggtgatttgtatgaaggtctaatggagaaaaacgccagcgaagtcaaatctggagcaggtcagtattttaccccacgtgtgttgattaacatgatggttagaatgactcagcctaaaattggagatcgctgtaatgaccctgctgctggtacttttggctttatggtagcagctgacagatatttaaaagatcaaacagatgattattcaaccttgtccgcagataaagaagaatttcaagtaaaagaagctttttctggtatggaattagttgaaaccacgcaccgtttagccatgatgaatgagtatcttcatggcatggatggacgattggaactaggggattcattatcttcaaatggtaaatggatgaaagattttgatgtagttttaactaatccgccatttggtaccaagaagggtagtgacgacagtgtaagtcgtgacgacctaacttataagactagtaataaacaattgaacttcctgcagattatctacaattcacttaaacacaatggtaaagctagagcagccgtagttgtgccagataatgtattgtttgccgatggtgttggcgaagcaattagaaaagacttgctcaacaagtgcaacttgcacactatcttgagattgcctactgggattttctacgctcaaggtgtgcagaccaatgtattattctttactcgcggtgaaagtgacaaggataataccaaggaaacttggatttatgatatgcgtcatcagatgcggtcatttggtaagcgtaatccattaagtgacaaggattttgcggaatttgaaaaactattctgcgttgacgatcgctcaaagagaaaagaaacttgggataaagagaagaattctaacggtagatggcgcaagtttacgattgatgaaattttgaagcgtcctaatactagccttgatatttcttggatgaatgatgaagaagagcacgataaccgttcgttgaaagaaatcttagatgagatgaatgacaagtctaaggcaattagggatgcaattgcggaacttaataaggcgttagaaggaattgacgatgaagactaatactttagattttgatgcacaggctttaagagaaaaaatcttggatttggccatgcacggaaagctggtgccacaagatcctaatgatgaaccagctagtgtattgcttgagaagattaaagctgaaaaagagcagttgattaaggaaaagaaaattaagaaaagtaagccgcttgctccgattactgatgatgagaagccttttgatattcctgatagttgggaatgggttagattgggggatgtaggtttactaaaaaatggaaaaactcccaagaaagaagacataagtagtgataatatttatccatactttaaggttaaagatatgaataataataacttatatatggaaaacgtgaaaaattgggttggagaaaaatatagccgacaagtaatgcctaaaaatacaattatttttcctaaaaacggtggagctatattaaccgcaaaaaaaagaattttgtctcaagattcattggttgatcttaatactgggggattaataccatacaatgacttaaatcacaagttcatattctatctgtttttaagcttggacataaaagactttgtaaaaggatctgctgtaccaacaattaattcaaaaaagttgaaagaaactcttgttccacttccaccacttgaagagcaaagtcgaatcgctgctaaaatagcgcagctattcgctttgcttcgcaaagtcgaatcttctactcaacaatacgcaaaacttcagactttgctgaagtcgaaggtgctggatttggcaatgcgtggaaaattagtcgagcaagatccccatgatgaaccagctagtgttttgctagagaagattaaggctgagaagcggaagatgatcaaggaaaaggagatcaagaagagcaagccgttgcctccgatcactgatgaggaaaagccgtttgatattcctgatagttgggaatgggttagattggggaatattgcaaaaaggattactgatggtacgcataatcccccaccgaattcacatgaaggaaaacaagttatctctgcaataaacattaaaaaaggaaaaatagatttttctttatcaaatagatttgtttctgaagatcaatttttaaaagaggataaaagaacaaacatccgaaagggagatgtattactcactattgtaggctcgttaggtaatgctgcagttgttgatactgataaactttttacagctcaaagaagtgttgcggttattagtagtaatattttaagtaagtttctttattatgttttaatttcagcaatgtttaaaactcaaatttttgctaatgcgaaagggacaacccaaaaaggaatatatttgagtaaattaattaatttgaaattacctcttccaccattagcggagcagaatagaattgttgataaaattgacaatttgtttatatattagaattaacttttaagagatgaatttatataatacgaggagattaagtatgcagttgtacagagataaagaaatagatatagagttatcgttacctgataaatataataaacaagataaaaagaaagcactaagtaaattttatagagataaaataaatccagatgatgataatgatcatgattttgtgtttttagaaaagcaacttcataagtttctcaaaagggctgttttgcgttttataagtaaagattatagtaatgttgtgctattagttggtgccggagcttcagttgtaactaatgagaatggaaatattaattcaaattatggaaagactatgcaagatatttcatggaatattttcaatcagctttatggaacaaataatttagaagaatatttagatgaaaaggatgctaagatctttttacctaaagatcaacaagaaaaatttgaaaaagttaattttgatgatgaaagtacatggttttcttttccattagaagaatatatttcaaatttaaatttatatattcaagacgcagagatgtctggtaaaaaagtcagaaatccaagtttatcacaagcaaaaaaattaaaaagatttattttactatcaatacttgattcagttgattataatttcgatagtacatctaaaatgccatttaagcatgataaagtgattttaaagttgcttaatttaattcattcggatagcagtaaattgatggttgcgactacaaattatgatttagcaattgaaaaatctctggaaaaagataacttcacaatatttgatggatttgaatttggaaataataaagaattcaatgatgatatgtatgagtgggttttgagtaaagaagttaacaatattaatactaaacaagttatctataaaaagcatgttatagatcttcttaaaattcatgggtctattaattggattgaaaaagaaaataaagttactaaatcgactgtggaagaggtaaaaagtacgattagagataacagtaatcatgtaaaaatgatttttccaagttctaataaatatgctcagagctatgaggaaccctattttgatctcatgtctcgatttcaaaataagttgcaccaacctaatacattattagttacttcgggttttagttttggtgataatcacataagtagaatgattataaacgcaattaagcataactcaagtttagattgtttgattactgattataatattcataattttgataaaaaaacagaacaagaagatgttaatgacaactggagtgatttagatgatttgagagatcgaggatataatattgcttttcttaaagcaacaatgtgtagttataattatgatttatcttattatgtgggataactatgagtttgatagataacttttttgatagttcagacaaaaatttgcatgtagacaaatgtgaatactatttaggtaaaatatctactgtatcttctatttttgctaatattcaaatagaaaacatgagtttattgaagtatcgcttcaatcaaagtgatgttttacgccctaatactattaattatcatgttttgattgatagtaatggcacaattttcgaaactgtcaaatcttttgtgtaaatagttctttctcgtaaattgattttttaattatttatttaatcaaagtaggattctaaggtgtcctgaacctgaccaaagcctttatgaattcgattgaaataacggtcattgtagctcattgcctgaatgccaataaaagcatcaagcgactgttcagttggaaactctgccttaggcttagctttgcgcttgatcacattgttaaatgattcaatcatgttagtcgaataaattgaagctctgatctgcttgggatagttataaaagaccagcagatctggttctatgtctttcaagcttctgataacatggctgtaaaccttgccccatttggtatagaagtcatgcaggacagctgtggcttcttctttgtttgtctgttgatgcacctgtttgaattcgttcatgatcttttcacgatcgtcgacgcgtactttagcgcagatattgcgcatgacatgaaccaaacagcgttgaaaatgagctttaggataagtcctggccaaggctgttttcatgccaacaacaccatcagaaagaaaaagctcaacttgctttaagcctcgggatttcatgttttgaagcatctctgtccagacttcaatgttctcgctaggcgcaatgcagtagtcaatgacctccttgtgcccattaggcttgatgccaatggcaatatagactgcttcacgctcaaatgtttctcggcgcaaaggaaggtatgtcgcatccaaatagacgcagaaaaacttgtcgcttagcttgcgtttgtggtaagcctcaacctttggaatcatctgcttggaaatatttgatacctgagctggactgtaatggctgccatacatcttttcaattagatcggctatttccctggtggtcacgcccttggagtaaagcttgataatcatgctttccaagatatccgagtgctgcttgtagccaggcagcgtgtgctgatgaaattgaccgttgcgatcccgaggcacttgcacttcaattgggccaaattgcgtatcaactttgcggaaataagcaccatttctagagttgccagtattccagccatttctggcatagggatcatagcccagaaaggcagtcaattcagcttctaacaagttattaacagcctgttgtagctctttgcgcaataaatcatttattttgtctggattgaatagagcttgagcaaaatctttggtaaaatcattcatgaaggagttcttctttctgtatgtgtttttttgttcaaaccaatcatacgagaaaggaactcctttttctaatgtttaaagaaataaatttaaggaatcattcatccttacacaaactattttacagtctccaattttcttagggaaagtaataagttctaggattaataatactgataatattcataaggcagtaatagaaaataatgatgatattatttacccaaatattgaaattaaactaatggcaatgtacgataaaaatacgtttgtattgcccggagatctaacagtaggaattggtgataaggcatatatctgtaatgatgaagctattaagaaatatataaattcattagaaattaataaaagggataatcaaattgaattttcaagctttaatttaaatgaaaagaaagctattccattcaaaattagtgttgatggattatttaatcaccattttatgattgtaggagcaacgaattctggtaaatcaactagtgcattagcgattttagataaatatcaaaagctaaaaggaaaatttttgattatagatccaactggtgaatataaagatgcattttcaaaaaatgaggttaatttaaaaacaatagggaaaaatttattcttgaatactgctaatttgactgatgaacaatggatttctttatttaggccaaatgataattcccaagtgattgagcttttagaggcaataaaaaaattaaaatttgttcaatactataaaaagcatttaaataaggtaaatttaaccgaggcagagaatagatttataagaaatgatattcttgactgtgaaggggcaaatcaagaacagtacaagcatcttcagattcagtgggaatctgataaagtttttaatgaatcatttgatataaacaatttagataaacaaattgagaaagattctttaaaacttagttggaataaaggtataaaacaaggaacctaccagtttgattattttacatatggagctaattcttggctaatacgtaaagtaaaatatttgattaagacgtataatctaaaagagttatttttaaacgtagatagtaaaactcaagataaggattttggagaaacagataaaggtaaaaagatactcaaagaccttaataaagaaatgttagaatttcaaggtaatgacatatcattatatatacgtttaaatgattccaaattttcaattggattaggacaagtaattgtagactatataagtaatttcttattaaatcatgatatgacaaaacatccaactttattatttgttgatgaagttcacagatatgctttagaaaaagatgctcaagatgattttatttctcctctggctacgttagcacgagaaggaagaaaaaatggaatatttctatttttaactactcaaagccccaaagatgtgccaactatagtattaaatcagataggaacacttttaatgcatcggttaactggtgaatatgaaattaaagcaatcaataatttcctaaataaagacaaattagctcagttgtcgagtttaaagtcaggagaggcaatattgactagcgtaaatttgatgcaaccagtcaatcttaatataaaagcttctgggcgaacacattacagtaatacgcctaagttgataaagataaaaaatgattgactacaaaactttaaaacatagtgaaaatgggatgccaacttgggatgcatttttaggtcccatgctagaggtagcgagtactaaagaagaatgggtaggtagagagcttgataagctgttgtcacagagattaatttacctgaagaacttgttaatttaagatatccttctaaatatcatgatttagtagcaattagtcgagtagcttgggcgcttagtgatttaaaattagctggtttactaatctcaccaagaagaagtatttataaaattagtgatactgaaaaactgctattaaataaatatggtctaaacatcactcgtgaattagtacattctcaaccagcatatattgagcaccagaagaagtttcaagagaaaagcactactgatgaagaagtcttagaagagcagacttttgaattagccgaagaaaagaagaagaaggatgagtacgataagctaagctccgaacttaaagatgctaaggataaaaaagaagaacaagagaaggagcaaaaagaacaggcaaaagcagctgctaaaaaagctactcaaatagcaaaacaatcacggcaaaacgagtcagctcaatctagtcgttcaactgcaacacatcattctaatggtggcggcaatcatggagacctagatacagcagaaactggcaaaattgtcggtaacgtcaattctaagatttatcacgtaccaggacaagcaggctatcatatgaattccgcaaatgcggtttacttcaatagtgagcaggatgcaatcaatgctggttacagaaaggcaaaaaggtgatgaataagaagaaaattattacacttgtttcaagtacgttgtttttgtttggcggctatggtgcgattactaatcctagtctaagtcaaaatgtcatcgccaaggttaaaactatcatcaaatatgaccacagtgctgagaaaaagaccaagcaaattgcgcaggaaaacaagcaaactgaaaagaaaattgttagcctagacaaaaagattgctaaactgcgcaaagaactcaagaagtacactggcaaacacaatattgaatctgttagtgccgcaaaactggcaagtcttaactattctgggaaaaacatcattacagtaaataacaacgatcctagtttttctaagagtgacttgagtactaatcgcggagcatggcaagaatatggtaacctcgatggtttgaatcgggtaactgccgcaaacgcattgcttattcagtcgctgatgccaagcgctagacgcgaaccactacatgttgatcctactggttggcataataaacgagttgctggcggctggctctataatcgctgccatttgattggttatcagctaacaggacagaacaacaacattaaaaatttgatgacaggtacaaggcagctaaatgatcctgatatgttgcgctatgaggatcaggttgctgattatgtaaaagaaagtcgaagcaactacgtccgctaccgtgtgacaccggtctttcgtggcaatgaactattggctcgcggagttgaaatggaagggcagtcggttaactcaaatgcagttcatttcaatatttacattttcaacgtgcaagatggcgtaactttgaattatgctaatggtactagtcgagtagggtagtagaaatgagatacccttattgataagaagatgactgagattaatttctcggtcattttttattaatgatatttccttagaaacaataatattgattctattaaacaacgtttttcaattcgtaaaataacaatcggtgcagtttctgtactaattggattgacttttatgagttactctagtcaaacagtacatgctgatagtgttgatgcaaattcatctgatagtgctactaccagtgttataaaggaccaaactactacagagcaagttgcttccacaactaaaacttctaataatgtagatacaaatggtgccaataaaactgaagacactactagtattgtgaagacaaaatcgactaacaaagttgatctttcaaatactgatttaactactaagaacaattcaatcgatgataactcaaatgtcggatcatcaattgaaagtaagaacaagatagctactaatgaaaacaagcaggagagtacgacttctaccaataagcaagctactacagtagcttcaactagtaagacacaagctaacaccactcaaaatagtcagtacaacactgcagattgggatggaagtttagatcaaaattctcatcaatacactttaactaaatataagggtactggtaataaaaatatttacatccctaatacccaagattttatcaatgcaggaacaataactactgatgataaagtctatatcactaaagacttattagaaactatcaaagatgcaggtgcagttaacattactattgacagtgagggagataagaacaaagtttatgctaagggtgacatgaccgcagccttaatgaacagtgacactttaaagtctgctgatctaagtcatttagatgttagtgaagccactgcaattagatctatgtttcaaaatgacaagaatcttgaaaatgtaaacatcgctggctggaatatgggtcaattcagtgacgtgtcacaaatgtttagtggcgctgaaaagcttgtgaaagttgatctaagcgatactgtatacaaaaatgtggtaaacgcttggaacttttttgcacataataatgccttaactgatgttgatctaacaaatgcccgcaacattactagagaaatagttaatggatacgttcaagcaataaagaaccaaatgcaactgccattgatttaactactacaactttgaattccaatgtaactaatctgaaacttttattttctagtattccaaatgtaaaaagtattaacttaagtggttgggatacaagtcgtgttactaatatttatgcaacatttggtcatgataaaagtcttgaatctgtaaatattagtggttggaatttatctaatgctaaatcgattgctagtttgttcgatggcgatagtaatttatccaatattgacctaagcaatgtaaactttggtaataatattggtgataatggtgattccttcggccatgttggtaataaattaagtaacgtaaatttgactaatgctaaaggaattcccgaagcagtattgagagcatggggtcaagcagcgaaaaataccaaggctactgagctttcaatgagtacatttactgtttcaaccgacagttgatttagactttaatcttcacggtcaaaaacctggcatcgattcaagcaatataaaggttagagacgaaatagcagtagtaaagtaaataaatgtgatagaggattggacttatatttaattgctgtaagttcaaccctcttattttgattaaatctttgatacaatagacatgattaaataaatagggtgtgatctaaattctaaaatctaaacggcatttcatgtttctaggagttgcaggaattatctattattcttggctcttaatcgttctatttatcgcctttattttgggctatgaagggaacaaagcaattagtatacctggaatagtagttggtatcattttcttacttttagcagtttatacttggtccttttcttacttgcaaaagggtggagacaaaatattactcaagttgccatatcgttcaaaagtaaaaatcaatcaaatgactttgctttcaagttggcgtaattttcaagtttatcaactaaaaagtgattaccaaagctattctgttttaatgatgtctagaaagaagaataagcaataatgaaatcagatattgaaatcgcacaagaaaccaaagaattacctattaatgaaatagccgctaaggtaggcttgaaagaggaagacttagaaccttatggtcatgataaggctaagattacttggcaagccattaacaggactcgtgctagtaaaaagttaggtaaattagtattagtaacgtcaatttctcctactcccgctggggaaggtaagtcaacgattacaattggcttgggggatgcaattcacaatcagttgcaccagaatacgatgatcgccttgcgtgaaccttcgatgggacctgtttttggattaaaaggcggtgctacaggtggtgggaaagcacaaatcatccctatggaagatatcaacctacacttcacaggagatatgcatgctttaactgccgcaattgacacacttgcagctttagttgataactacatctaccaagacaatagcctaaatcttgatcctgaccgaattttacttaagcgtgggcttgatgttaatgaccgtgctttaagaaaaatcacggttggtcaaggctccaagtttaatggtgttgaacatcaagctagttttgccattactgtagccaacgaattgatggcgattctctgcttggcaactgatattaacgatttaaagagtagaatcggtgacatgctagttggttacactaaggatgatgaaccggtttatgttaaacagttaggattccaaggtgcaattgctgcactattgtctaatgcgctgaagcctaacttagtacagaccttggaacacacaccagcattagtgcacggggggccttttgctaatatcgcgcatggagccaattccgtcattgcgacaaacttggctttgcatttaagcgactatgtattaactgaggccggctttggtagtgatcttggtgggcaaaagttcatggactttgtctcaagacatctggacaagacgcccgatgctgcagtagttgtagcaactgttcgtgcattgaagtatcaagctttaggctcaactgatcacttagatgaagaaaacctagatgctttaaaagaaggttttaaaaacctcgagcgtcatatgaacaacatgcgttcatacaatgtgccggtcatcgtgttaatcaatcgttttgcttcagatactgaccaagaacttgctttgcttaaacaattaattgaagaacaaggtattaatgctgaagtagttacttatcatggcgaaggttctaagggtggtgtagaagccgctcaagctgttgttgatttggctaactctggcaaggcagatttaactccaacttatgcagatgatgacgatgttaaagacaagattgagaaagtcgctaccaagatttatcatgcagctggagttgaatatagtgacaaggctgaaaagcaaattgcggaattaagaaagttaggtaaggcccaattaccagtaattattgccaagacccaatattcatttagcgacaacaagaacgaattgggtgctccaactgactttaagcttcatgtgaaagggattagtttaaaaaatggtgcgcattttatcgtggttaccacaggtcatgtgctagatatgccaggtttgcctaagcatcctgcggccctagatatcgatgttgataacaatggtaaaattagcggattattctaaaaagatatgcagtttttatatttaattatttcattagttgtggttcttgccgatcaaggacttaagaattatattgttgcccattatgctgtgggagaagtacaccagattattcctgggcttctttcctttaattatttgcaaaataatggtgcggcctggaacattttaactggtcaaatgtggcttttttacattatcagtattattgccattagtgtttgcttgtattttctttttaacaaaaagtacaagaataccttgtttgatgtgggtttagccctcatcttaggtggaattgttggtaattttattgatcgtttgcatttaaaatatgtagttgatatgcttcagcttgattttgttcacttcaacatttttaatattgcggattccgcaattactgttggagtaatccttgtgttcatttacttaatttttattgaaggtaaggaagaacaacatgactaaagaatattcacttgaagtaaaaaacgaaaagggacgtttagataagtttgttgcagaacaaattcctgatctatctcgaactagagttaaagaactggttaaagaccaaaatatcctagttaatggcaaagtcgaaaaagtatcttataagattcaggcgggagataaaatcgaagttaatattccagcggttaaaccgttagatgttatacccgaaaatattccacttgatatcgtgtatgaagacgatgatgtcattgtagttaacaagcctcaaggtatggtagtgcatcccgcaccaggtcatccagatcatactttagtaaatgcgttgttatatcacaccaaggccttagcacaatcaccagaaggatttcgtcctggaattgtccaccggattgataaagatacatctggtttattaatgatcgctaagaccgccaaggctcgtgaatcattagaagatcaattggctcataagactaacaaacgtctttattgggcaattgttcatggtaattttgcggaagaaaatggggtaattgatgcaccaattggtcgcaatccatatgaccgcaagaaaatggcggtagttgaaacaggcaaaaaagctattactcacttcaaggtgcttgagcagttcaaggattatagcttaattgagtgtcagcttgaaactggaagaacccatcaaattagagttcatcttgactatattggacatccggttgcaggagacccattatacggtccacgtaaaaccttgaaaggtcatggtcaatttttgcatgctaaagtattaggatttaaacatccaagtactggcgaatggctagagtttagtgtagaaccaccacaaatttttcaagaaacgttggctcaactagaacaaacaagtaagtgataatatgaaacggtatttgattttagaagatggcagttcatttccaggtgaaggaattggtgccagtattatttcaaccggtgaattagcaattcaaacggctaattttggctaccaagaagcattaacagatcctactaatgctggtaaaattttagtctttacttcaccaatgattggtaataacggtattaatgccattgattatgaaagtattgatcccgtagttaaagggattattgctaacgatattgcattaaatatttcagatagtgaaaattttgaagatttaagttcttttttgaaagaaaagaacatccctgcaattttcaaagttgacactcgtgctttagttcatcgcttaatggaagaaggtacaattaaggcttcgatcatggatactaatgacgagcatgcctttgatcagattaaagcactagttttacctaaaaataaatctgcgactgtttcaactaagaatgcatatgcatcccctaatgttggacgaactgtagctgtgctagatcttgggctaaagcactcaatgctgcgtgctttatctttacgaaaagtaaatacgacagttttaccatacagtgccagtccgattgatattgaaaacttacgtcctgaaggaatgattatttcaaatgggccaggaaaaccagaagaagtaattaatcagctaacgccagttttagatcatttttatggtaagtatccaattttaggaatcggattaggttttttaactttgagcgattatctcggctttgaactggttcaattaccacaagaatttgatggtattaattatccagtgattgaacaaaatagtaatgctatctggcaaacagcgatgaatattgaccaactagtgttgcctgatagtgtgaagatgaatatgaatcgtgaatactttgatctacacagtgaactgatggcgggcttctggaacagtaaggacaaattgatcgccactgcttttaatcctgaaggagcaccaggcactaatgatgcagatgaaatttttgattattttttacagatgatggggtagttatatgccattagaaaacgatttagataaagttttaattatcggatcaggccctactttaatcggtagtgtagcagaaatggatcttatggcaacagaagcaattgatgctttgacagaagaaggcattcaagttgtgctagtcaatcctaatccagctacaatttcaactgataaaaaacttggtgtaacagtctatcttgaaccgatgactctcgacttcctgaaaagaattctacggatggaagagccagatgcaattatgacagcttatggttcaactaatggtttaaaggttgcacataagttattacaagatggcgttttagaacaaatgggaattcagttactaacattgaattcgcgtgctctacaaatggggaatcaacagaaaaagacagagttgcttactaagctacatattgataccgggcaatcttgggaacttaatcagagtattcaggataatttagataatgcgctagaaagcattaacgacaaagtcacttttcccgtattagttactaagtacaaccgttttgtacacaacgaacatttgcaatttgcaaatcctaccgatttaatcagttactttaaagaagaaaagcaaaatgataattttacatggaagaattatcgcttaactgaagacttatctagttgggaagaagtaattgttgacgtaatccgtgataaggatggcaatttagcttttatcaattttgcgggatctattgaagctgtaggtattaattcaggtgactctgcagttgtgatgccatcattaaccctaaacaatgatcatattcaagagttaagaataaccgttagaaaaatcatgtctaatcttgatctcattggatttgctagttttcattttgcgattaaacaccatggaactcaaattcgatctaagcttttgacgattcgtccgcgtttgacgcgaagttctgtttgggctcaaagaattggaatgtatgatgtgggatatgtcgttagcaaagttgctatcggttatcgactgaatgagattaccgatcctctatctggacttaatgcctcaattgaacccaccttagatgcagtagcaattaaaatgccatattggtcatttgctgaatccggctataaccactatttgctaggaagtcgcatgcaagcaagtggagaagcaatgggtgtaggccgtaattttgaaactgcttttctgaaaggcttagatgcaactattaatttagaattgggttggcatgcttttataaaagaaaaagaaaaatccactgcagatattttgaatgatttggcacatcctgatgaattgcatttagttaaattattagccgcaattgatcaagatattccatattctgaattacaaaaagtaacacatttgcatccggtttattatcagaaattgcttcacattgtaagacttggcaaaaagttattacaagagaaggagcagccttcgcgtgatttgctgcaagaagctaaagtctatggattctttaacccattattagctaagattttacaaaaatcagttactgaagttcgctctttgattaataaaattgacttgcagccatcatatttgaagatcgacggctcagcaggtatatataaacctaatgtttgtgcttactacagtgcatatgatgttcaaaatgaagcacaagctttaaatgctgaaaaaaagatcttgattttgggcatgttgccgcttcaagtttcggttactagcgagtttgactatatgattgctcacgcggccgatactttacataagtatggctatgttactgtgcttctatcaaataatgacgaatcgatttcatcaaggtataagaatattgaccgagtttattttgattccattacagttgaaaatattctaactgttgctaaaagagaaaatatttctgatgtattagttcaattttctggcaaaagaatcagtgcattgagtaaagagttggaaaaatgtggtttgcacgttattgggcaaaaggcaaacgacgatccgcgggataagattactactttgcttgatcaacaatctactaccttaaagcgggtcccggcattaaataaaacaactgatacagaccaggttttcgcttttgcttctaaatatggttttccacttttaattggtggtatgaataaagaaaacaagcaaaaatctgcagttgtttatgatgttcctgcaatagagaaatatttagcagaaaatcatcttgatcaaataactatttctcgctttattgagggacacaaatatgaggtaacggctatctctgatggtaccaatgtaactttgcccggtataattgaacatctagagcaaacaggttcgcatgcctctgattcaattgcagtgattcagccgcaaaatttaaccgaagagcagcaaaaaaagattgagcaagagtcaattaaattaattaagcagctgaaaacaaaaggtatttttaatctgcactatttattcgttgataatgacctatatctattgcaaattaaaccatatgcaggtcataatgtagcatttttatcaaaatcactagataaggatatcactacttgtgctacagaagctttaattggcaaaaatttagcagagctaggatatcctaatggtctatggcaaaacagcgattttattcatattaaaatgccagtattttcatttcttaattattcaagtggtaatactttcgattcaaatatgaaatcctcaggttctgtaatgggtcgagatactcaactagctaaggctttatacaaaggatatgaagcaagtgatttacatattccaagttatggaacaatctttatttcagtcagagatgaagacaagaatcgcgtgacccaactagctcgccgatttgatcgcttgggtttcaaattaattgcgaccgaaggaacagctaatatgtttgcggaagctgggattactactggagtagtggagaaggttcataaagaccctagaaatctactagataaaattcgtcaacataagatcgtcatggttgttaatattactaatttgtctgatgcagctagcgaagatgcatcgcgcatcagagatgaagcgctgaatacacatattcctgttttctcaagtatcgaaacagcggaattgattttagacgttctagaatcattggctttaactactcaacctatttaataagcaaaacaaaatgcaaagtcgatatgactttgcatttatgagaatcattgaactaactagttcgatgatttttatttttcaatttttttattcataatttccttttcttcaggagttacttcaattgaattttgtccagtgtagattacaaatcctggtttagcaccattaggctttttcacacgcttgtcttgcacataatcaacttgtacgtgagcggaatttttagccttagaaaagtaagctgcaatctcagccgcttctttaatatcttgatcagtaggctgatcatcgcgtaagatcacatgtgagcctggcatattcttaacatgaaaccagtaatcagatttattagcttttttaagagtaagccaatcgttttgatagttgtttttaccaaccaatacgtgtttaccagatgaaagtttaaattcatttaaattgcgttcaatgattttcttcctacgcttatttttcttttgtttacgtaaatatccttgattaatcaattcatctgtaatttgatcaatatcctgtggatccgcattgtcaatagctgtttgaattgaatccaagtaacgaatatcatccttagcaatacgaagctgttcattaatgtgcttaatagaatcacgtaactttttgtaacgagtaaaatacttttgcgcattacgagcaggggagagagcaggatctaatttaatctctaatggagcattattttcgtaatagttaggtaatgaaactttagtcattccaggttttacttgagccaaatttgcatttaaaatttcgcctttaattctatagccctctgaattttcagcaagatctaattgcttctcaagttttttaactttcttagttagtttattttgctcattcttaactacacgttcaacttgtcctgcacgctgcttaacccaatcacgtgttgcctgatattcataaaattcatctaagccagcattcagatctggattagagctttctttctctaaatctaaatgatagggcaaataacaaaaaatcttacgcttatttctaggtgtttttaaaataaaagcacgcggattgtcaaactgattaaaaaaggtcttaaaagatgaataagtgtaatcgtcttcaagatagcctaataattcagttcgatcatctttatctaagccatccattttttgagcaatttcattaggctggttttcactacttaattgtttaaattcactttctgatagagtcaacccatttaatcctggttttagtgggggcaactcatattttgcttttggcagtaaaacacgcgctctattttcatcaggattaattcgcttaagtaaatcaataatgtgattgtcttcttgattataaaggatgacattactatgacgtcccattaattctacagaaagcatgagcttgacttgatcaccaagttcatttcgattactaaaatgaaagttgacaattcgacctaagccaacttgctcaatcgattgcaaaactgaaccttctaagtattttcttaaaaccatgacaaaaataggtgctttatcaggatttgcaatgttttgtttagtcaaatacattcttggatattgtgcattggccgaaattaaaaattgataattctttctatcttttctaaaaattaagactagatcttgatcaaatggttgataaatttttgataagcgaccacctaccagagtagggactaagtcttttaataaactatggataaataatccatcaaatgccataaatatcacctcaaagttcgtgtaatattatatcaatttttagtcagattctaaaatgattatatttataagttatagctaatcataattgaaacctgcaatacagtagtaaatgtttcacgcgaggtctgctatatcattaagttgtatattacaacataaaaagtgcattgtattatacaatattactgataaattagccttttggtattatcaaatgccatattaaatgataaaatacaagtatatagtaatctacattggagaaaaaggactatacgaatggatgtattattttttagtacgatcgcagatcaagtgaaaaaagaaataaatcacaaatgcggcttaaatatttcacaaactcgaattttgctattttttgatgaaaacaaaaatcaagcattagcgatggggaagctggcagaagcgcttaatatttcattatcaaccttaagtcgtcaattgcagcaaaagaagactatgagctttattaatatcactagatcggaaaaagattcaagcaagattgtgaatctaagtgaagctggcgtgactaaagctaaagaactaaaaaaaactctgactaagattgagaatttattatttgtctattttgacagagatgctgctaatttatttattaagcaattaaatcaagtcgctgatacttctatgaccctagaaaaaatggaatagggtgcgtgataggtgccttttatgctataatttttctatgctaaattagatatgggaagggttaataaattgaaaattgcattagttactgacagtactagtgtcttaactgatcaagaagttaaaaataatgatattaatgtagttcctattcctgtcatcgtaggtgataaggaatattcagaaggcgttaatatcacttccacccagctttttgagatggagagacaaggtgctgcttttcctaaaacttcacagcccagcatggggcaaatgatagaattatgtaataaattacacggagaaggctatgaagctattatcgctatcactttgtccagtggtatctcaggcttttatcaaaatatggtaaatatggcacataacaatcctgaatataatttatatccatacgattctaagatgacagttagattgcaaggctacttggtgttagctgccgcaagaatgataaaaaatggtatggaaccagaggctatcttaaagaagttagatgagatacgtaagacaattgatgaattctttgtagtagatgatcttaaaaacttaagtcgtggtggtcgtttaagcaatgccggtgcttttattgggacaatgcttcaaatcaagcctttgttaacttttaatgatgaaggaaaaatcgttgcttttgataagatcagatcattaaagcgtgctgtttctaaggtagaaaaattaactttagagaagacagcaaatttgccttataaagataagctacgcttgtttgtatttcactcaaatgatttaaagcaagcggagcaaattaagcaatttgttaatgaaaactttccagataagccagttgatgtagctgaatttagtccagtaatcgctacacacttaggagagaaatcaattgcaattgcatggatggttgatattgataagctcgaattaaaataagaacaaatagccatagaccatagtacaaactatggtcttttttgtttaccctttttacgataatagatttgtaattaaaaattacagttgagatactagtgctgaatgttatagtaaaattggagactgtaaaatagtttgtgtaaggatgaatgattccttaaatttatttctttaaacattagaaaaaggagttcctttctcgtatgattggtttgaacaaaaaaaacacatacagaaagaagaactccttcatgaatgattttaccaaagattttgctcaagctctattcaatccagacaaaataaatgatttattgcgcaaagagctacaacaggctgttaataacttgttagaagctgaattgactgcctttctgggctatgatccctatgccagaaatggctggaatactggcaactctagaaatggtgcttatttccgcaaagttgatacgcaatttggcccaattgaagtgcaagtgcctcgggatcgcaacggtcaatttcatcagcacacgctgcctggctacaagcagcactcggatatcttggaaagcatgattatcaagctttactccaagggcgtgaccaccagggaaatagccgatctaattgaaaagatgtatggcagccattacagtccagctcaggtatcaaatatttccaagcagatgattccaaaggttgaggcttaccacaaacgcaagctaagcgacaagtttttctgcgtctatttggatgcgacataccttcctttgcgccgagaaacatttgagcgtgaagcagtctatattgccattggcatcaagcctaatgggcacaaggaggtcattgactactgcattgcgcctagcgagaacattgaagtctggacagatatgcttcaaaacatgaaatcccgaggcttaaagcaagttgagctttttctttctgatggtgttgttggcatgaaaacagccttggccaggacttatcctaaagctcattttcaacgctgtttggttcatgtcatgcgcaatatctgcgctaaagtacgcgtcgacgatcgtgaaaagatcatgaacgaattcaaacaggtgcatcaacagacaaacaaagaagaagccacagctgtcctgcatgacttctataccaaatggggcaaggtttacagccatgttatcagaagcttgaaagacatagaaccagatctgctggtcttttataactatcccaagcagatcagagcttcaatttattcgactaacatgattgaatcatttaacaatgtgatcaagcgcaaagctaagcctaaggcagagtttccaactgaacagtcgcttgatgcttttattggcattcaggcaatgagctacaatgaccgttatttcaatcgaattcataaaggctttggtcaggttcaggacaccttagaatcctactttgattaaataaataattaaaaaatcaatttacgagaaagaactatttacacaaaagatttgacagtttcaaaattgctatagtaggcaatagtaatatggttatcataaaatataggaattaatttaataactgttttactatagtatatattttaatgttctttttatgttacaatcatttttaaatcaaattatagaaattcgaggaaatgcatatgtctgcaagcatacttattaagccattagttacaatcagcgttaaattaaacataaggaaattacatcaaattgaaaaatatcaacaataatcaaaacttaaactttactcaagttaaagatatcttagctcaacaggcaattactattgctgccaaagaacaattaagttccgtccaaccaagtagcaatttacataaagtagaacaactgcttaatgaaacagaagaagccgtgaagattttgaaattacggcagcacattccttttgccagttctgaggatatcgagcatttaattactaaagctgaaaaaggactaatcttaactcctgatgatctagaaaaagtagcagaatttttacgagtaaatcgcctactacaacgctttttagccagacatgagcagctagcaccattactcaatgcatatgtccaagacatgacgctattgccagacattgaagatgctatttatactactattgaacatggtcaagtacgcgatgaggcagatcgtgaactagcaaaaatgtgccgcgacttaaagaaatctgttactgaactcaaaactgcattaaatcattttttgactagtaaacctaatcaaaaaatgattagagacgcaatgatcgttgaaaaagagggctacgctaccattccaattaaagcaaactacaaaaatcaattgtcagggactattgtggctgtttctaatggtggacaaaccgtctactttcaacctgctaaggttgttcgtctaaatcagcaaataaccaatttaaaggcacaaatacgtaatctagaactagcaatcttaggtgctttaactgcaaaaatatacgacgtgaaggatgatattaagcgtaacattgaactaatcactttactagatatgatttttgctaggggaaagtttgcacaaaaatataattgtattaggcctaaaattaatcgtgaaaattctcttgttttacgtgcagtgcggcatcccttgatcattaatcctgttccgttaaccttagaattaacccaagaaaatagtgttctaatgattacaggaccaaatgctggtggtaaaaccgtcgcgcttaaaactactggcttgatgattttaatgaccgaactaggtctgtttttaccaagcgataaaccatgtgatattccattaatggatgacgtttttactttaataggtgatcaccaggacctagataattctctgagtactttttcagccgaaatgaaagatattgccatgattaccaaatatgctcaattccatagtttagtattattagatgaattagggacagggacagatccaaatgaaggaagcgcactcgctattggtattctacaagagttgtatttacgtggctgtttaatcatggccacaacacactacagctctattaaggattttgctaagcagcatgatggttttatcacagctgcaatggattttgacttaaaaaatctgcaacctacttataagttaaagataggaagtattggtaatagtcgagcactatggatcgccaaaaaatcaggtattccagaaaatgttttgcatcaagcagaagccatattagcgggcaataatttacctttatctttaaaaaaacgtttcgttcaccagcggaaaaacaaaagcaacctggttgttaaaaaagaatttcataaaggtgatattgtatatgctaccaatttaaaagaagaaggaatcttttataaatatcttcctacccaaaatgcagcaaagatatttgtgacaaaagaatttgtagaagtaccactcagacgtttacaattaagacgactagctaaagacttgtacccaaaaggatataacttagatttactctttgttaaagactggcaagattataagtttaatcgtgatctagatcgtggctccaaaaaagcttacaagaaattgaaacattaataaaaaacgagtttggaattgaatagccaaactcgtttttgcatttaatttgattaatcgtgatttttttttgagatctcattgagagccgcacgctgttttttctgatcaacatgagtatatagatcggtggctgaagtgcctttttgacctagctgttgtgctacaagcacttgatctttagttacttcatagagctcagaagcaaccgtatgacgtaacttatgtggggtaaggggatgaccaaaagctgcagaatacttattgatcattttttcaattgcattagttgtaattcgccgcgtttgaccatgccattgagttaaaaagaatgccacttgcttactatctgcatgatagcgttcattacgaatacctttatatcgcttgatataaggaagtgtccattctgcaattggtacactatctttttgtccgccttttctagttacatctagtacagcatccttaaggtttaaatcactcaaatcaacgccagcacattcagacacccgaatgccggtacctaagattaatgcagcaattgccatgtcacgttctttgttttgcttaaaaccaatctttgcttgcttattacaatggttaatatagtcctgatcaataaaagtcaaaaattcaaattttaacttaccagtgtacatgtggctttcaagtacatgagcccgataattaagtgtttgcgtatcatttaaagaattaattttaagcattacattccgttcaaaatatggctcaccatgattattgtcggcagtaatggttaaaaacttaaatagggagcgtaaagcattaattgagcgattaatcgtagtgggggagtttagtcggccttgcttattacgggtatgtcctaaataatcaatatacagcattatgtcattgcgacgtaagttggctaatgtatccgtagtaacatgagcattatctgaagcagaagagatattttcttgacgtagccaatcgaagaagcgtcgaatttcagttaagtactggtaagtagtagttaatgaatgattagtaccaagattaaattgcttaacaaaatcaggcaatttatttacttcaatttggatcaattctaggtatttagcagtttccatatctactccttttgcgaactaatgtttatattatatcatacaaatacgttaatcataaaaaaatcacctattctcaggaataggtgataaaaaacagtctaatttaaaattactgcgctcattcgaacgtgaatatctatagtactaacgtagaaaaatgattgcaactaaatttaacttagataatcatgtcactataactagaataccagcaacgcttatagaaaactcttagcattctaattatagcaacagtgattgctcgtcagtaagtaagggcaaattacatttagtaattcaaacattacttacaaacatatgttgtttgtatggtacaacacttttcaatcgtttattttatgctctttattgctaatgttcaagtaaaatataacattttttataaagaatcgaaaaaagcttattttccttgtttagtcgtattttttggctaaaaattgtacaatagatgaaaatacattatgtgagatgaggaaaaagtatgacagaagaaattagtgtaaacttccaagctaaaaaccctagtggtatcaaattactgaatcgtctatatgatggtcacttagtgttaaacgacattggcgttcgtttagatgaacaacttaataatgaagatgaagaattgactgtaccaactcaagcagatgtagataacttgagtgagacttttggtaaaactgtcacagttttcagtgatattgccgatgcatatggggatgtaaataattttgcgaaaaactttggtggtaccactaagatttttgctcaaaagttaattactgaactagtagatttcaataatggtattgcggacattggagattccgaaggcggtttagaaaactacgataacgataagcttaatgactggattaatcaagtaatgagcgacatcgttgaaactaatgaagcatttaatgcattaattgatgataaataataaaaagtgtcagtccttaaaatgaggattgacactttttatagttaattgctttttaaactggacattggataaactgtgtaatcagcacggtaaacaaatagacgatgaccatcaatcacaaattgagttgcattcttcatatcactcttatgaattgagacgtgatttccaataaagacagcaatcggcattcctaattggcttctaatcattactactcttgagctaccattccaatcgtttttaaaattctgatacattgtatttaacagaggaacagaacgattttgatcgtcgatcttaacttttttgttaaatgcatcctcgtagtttttcagtccttcataggcaatcatagtagaaccaacgtgaatcattcgattattgccatagtcaacatcaattacgctagaatgttcagtgccattactacttttctgtgacatctttttatcagtatgaatattaactgacttagctttgatctggtcgatcttttgtccattagaatcatacgttgatactgttaagggcaatgccccaatcttagagcgcatagataattcccagttttgaaaatcactacaaccagtcagagaaagcaataatactcccagacctaagaataaagctaacttctttttaaatttcatccttatcttatcctcgtttctatataatgccttaattttaacatggataaaaaagggatgcagataaataaattggaaatgatttgtcagttcatttacgttttagggatgcatcaaaaaagcagcaaatatttgctgctaaaaataaattagaacttgtctgctttgacgtaagcatttttaccaattcgatagtaagcttcattattgatgtaatgtttagggccataagtcttgatcggtgaaccggattttttagtagaccattttgtattaatggtgccatcatttttatacactttagcatcagctttaaagacgcgtgaattgcctagtacgttacttgccatcacatacttgtcttcaccgacacgaatcattgatttgcctttaattctcaccttattgtcataataagcaatagagctgtaagcattataaaaatcatttgtccggttgctatttttgtcataaacatatgacttgtacataactgtagctgttttcttggtattggaagccttaggagcctgtgaaactgccgcgttacctgcgattgataatggcaagactgtaatattgccatcagtattcattccgcgccaattatctgtgaactgccagattgcgacaccatccattgaagggaagtatttaaagttgggttggtctactcggcctgaaatcgcatatgcggctacccagagtgaattaggatacttgttcacgatagatggagtattaatattgttttgcaaaacggaagaactagcatagagaagtggttgatagccagccgccttaatttgatccataaaggcaataatagccttagctgtcacatttttaccattagtaatgatattgccctgaccagtttcataatcgcaggctaagtatgagccagctggtaatcccaacgccttagcagaagaaattgcgtattgcgcttcgcgcttagcggccgatgaacttgaactaaaagttgcaaaatgataagccatcggcatcatatcattagcaatagcagatttaatctgattggctgccttagggttgcgataactggttccctcactaactttaacgattgcaaattgagaaccagccttggcatgagcagttaaatctgcgctttggtagctggcaacatcaattccaagggctttagcaacaactgatgttgatgaagcttgcacaatgctctctgagtcagagaaacgagtcatttgagataaaagtgtgacacctgcattcgttaacatagttgcacatgctaatttaataattgatttccttttaaacaatttatgtcctccatacttagtggagagaatcttatctatatctctcacataatttatactttatagactacagatatagttctcaaaaggcaatagatgagatcatttattaatatatcagtaatcaaaccgaaaaaaattgaaatcaaattgagatatacaatagacaaaaaataaagaattagtcgtggcaagaaatatgccccaaatctaaagaaaagtataagacagtcaaataatatattttaaaagtgacaagaaatagttcattcgcttaaaataaagaaactgtcaaatcttttgtgtaaatagatctttctcgtaaattgattttttaattatttatttaatcaaagtaggattctaaggtgtcctgaacctgaccaaagcctttatgaattcgattgaaataacggtcattgtagctcattgcctgaatgccaataaaagcatcaagcgactgttcagttggaaactctgccttaggcttagctttgcgcttgatcacattgttaaatgattcaatcatgttagtcgaataaattgaagctctgatctgcttgggatagttataaaagaccagcagatctggttctatgtctttcaagcttctgataacatggctgtaaaccttgccccatttggtatagaagtcatgcaggacagctgtggcttcttctttgtttgtctgttgatgcacctgtttgaattcgttcatgatcttttcacgatcgtcgacgcgtactttagcgcagatattgcgcatgacatgaaccaaacagcgttgaaaatgagctttaggataagtcctggccaaggctgttttcatgccaacaacaccatcagaaagaaaaagctcaacttgctttaagcctcgggatttcatgttttgaagcatatctgtccagacttcaatgttctcgctaggcgcaatgcagtagtcaatgacctccttgtgcccattaggcttgatgccaatggcaatatagactgcttcacgctcaaatgtttctcggcgcaaaggaaggtatgtcgcatccaaatagacgcagaaaaacttgtcgcttagcttgcgtttgtggtaagcctcaacctttggaatcatctgcttggaaatatttgatacctgagctggactgtaatggctgccatacatcttttcaattagatcggctatttccctggtggtcacgcccttggagtaaagcttgataatcatgctttccaagatatccgagtgctgcttgtagccaggcagcgtgtgctgatgaaattgaccgttgcgatcccgaggcacttgcacttcaattgggccaaattgcgtatcaactttgcggaaataagcaccatttctagagttgccagtatttcagccatttctggcatagggatcatagcccagaaaggcagtcaattcagcttctaacaagttattaacagcctgttgtagctctttgcgcaataaatcatttattttgtctggattgaatagagcttgagcaaaatctttggtaaaatcattcatgaaggagttcttctttctgtatgtgtttttttgttcaaaccaatcatacgagaaaggaactcctttttctaatgtttaaagaaataaatttaaggaatcattcatccttacacaaactattttacagtctcaaaataaagatagttaaagaaagcgctttgtttaatcagaaatgtgataagatattttgcaagaaagcaaatgtgatcaaaatgctacattggatttgggtattaattgttggtggagtaatcggcttaattgcaggtgctttaactggacatggtaagtcaatgaactggattgctaatattttagcaggattggttggatcttcactaggccaagcccttttaggggaatggggaccgaaggttgcggacatggcaattgtaccgtcaattttaggtgcagttatcttggtaatcgtcgttgccttcattatgaataaaattagacctgcaacagattgagtttattcagatttttattctagctagataagcaaagagcctgattggacgaattatgtctgatttcggctcttttttcgtcttccctggtcagcagaggaggggagatagaggtataataatgaattaaaatgttgcttgtttgtataaagattgagtaaccacgataaattaattcattaaaaagaaatcttagagtgattctcagcattttttgaagattgaaactttatttagatgtcttattcatgtaaaaacacagatttaagtagcgacttgagtcatgagtttagtagaattatcatttttaccgcttgattatttatttaagaaatttcaatatgtgtattattgcagcaaatcttaaaaatagggaataagaataaatataaaagcacttaataccgatttgtatgtagcaaaaagagcaaagaatttataaaatatttttttacgaatttaaaatgaaatacaaaacgttaaaacaataaaaataacaaaagcacaaatttaccaaaattaggcttttgcgagataggtttatctagcgatcattaaaatttttgttttaaagaaagctatagcataaaaataaaaaatggctttatagatactaaaggcaaaactagcaaatattactcaactattttcattgtttttaattagaattactttaccataattgtttcaaaatacttctctttgaaggttgttttattgattattgtcagcatattattcaattcaggaaactgtcaaatcttttgtgtaaatagttctttctcgtaaattgattttttaattatttatttaatcaaagtaggattctaaggtgtcctgaacctgaccaaagcctttatgaattcgattgaaataacggtcattgtagctcattgcctgaatgccaataaaagcatcaagcgactgttcagttggaaactctgccttaggcttagctttgcgcttgatcacattgttaaatgattcaatcatgttagtcgaataaattgaagctctgatctgcttgggatagttataaaagaccagcagatctggttctatgtctttcaagcttctgataacatggctgtaaaccttgccccatttggtatagaagtcatgcaggacagctgtggcttcttctttgtttgtctgttgatgcacctgtttgaattcgttcatgatcttttcacgatcgtcgacgcgtactttagcgcagatattgcgcatgacatgaaccaaacagcgttgaaaatgagctttaggataagtcctggccaaggctgttttcatgccaacaacaccatcagaaagaaaaagctcaacttgctttaagcctcgggatttcatgttttgaagcatatctgtccagacttcaatgttctcgctaggtgcaatgcagtagtcaatgacctccttgtgcccattaggcttgatgccaatggcaatatagactgcttcacgctcaaatgtttctcggcgcaaaggaaggtatgtcgcatccaaatagacgcagaaaaacttgtcgcttagcttgcgtttgtggtaagcctcaacctttggaatcatctgcttggaaatatttgatacctgagctggactgtaatggctgccatacatcttttcaattagatcggctatttccctggtggtcacgcccttggagtaaagcttgataatcatgctttccaagatatccgagtgctgcttgtagtcaggcagcgtgtgctgatgaaattgaccgttgcgatcccgaggcacttgcacttcaattgggccaaattgcgtatcaactttgcggaaataagcaccatttctagagttgccagtattccagccatttctggcatagggatcatagcccagaaaggcagtcaattcagcttctaacaagttattaacagcctgttgtagctctttgcgcaataaatcatttattttgtctggattgaatagagcttgagcaaaatctttggtaaaatcattcatgaaggagttcttctttctgtatgtgtttttttgttcaaaccaatcatacgagaaaggaactcctttttctaatgtttaaagaaataaatttaaggaatcattcatccttacacaaaatattttacagtctctgaattcgagttaacaaatccaaaataagacttatttgctgaaacaattaaattaattatgacttctattattaaattgattgtttttcaatctggctttacataatatgaattatacgcagatatgtcttgaagcattttactgtactctctgccatccttctcgtaaatttgatataaaaaatcatctgcaaaaattacagatgatccataaaacttattcatttttaaaattcaatttattgtttgtcttcaaagctaacagatatacaaaattaatcgctgctaaaaatacaactgcaaaccaaatagtttttaatacccaaatcttttgcagtaacgctgaaacgtttgctccaactgcaaatgaaattgttatcatcatataattaacggctgctgtgtgctgactcttatctgcgccaaagaaaaatgcactccacgcaactacagatttcttcaaattacctgttgtaaatacattattgtatcccatgccttcaattttgctgaaagatgcattttgaacagctaagccaaaagcaattgctggaactatatagtaatttggtacgcttttaggtaaaaatccaacgacggtacaaattactaatattgggaacaaacaaaatactctccaatattgactcttaacgtatttatgaaaaagtcctacaagaagtaatcctagtgaaaaagctataaatgtacttgcacgattgatcattcctggaatattatggtcagccaatgctgaactgaaaaatattacgtttcctgtttgtccagcagataatgtgtgtcccctttggatatatgtataagcatcaataaagccaccgcagaatgttaaagcacaagctaattgccttgattctgaaggcttagcactgttaaaaatatctcgtagattttttcgtaaactcattagtatctttaatcctccaaaatatagtcatagtttattataggctttattaattattgtagttacatttgattgatcgattttattcttattattttgtaaatttctcttaaaaatttacaaggctaaatatttaatacaaggtgttatttgcggtagaatagcctaaaaggttgaggttacgagctttattcactaaataaataagccaatattgatatttaatataatacaagttaacactattaaaatagtttattcattttcaccctaatctttgagactgtaaaatagtttgtgtaaggatgaatgattccttaaatttatttctttaaacattagaaaaaggagttcctttctcgtatgattggtttgaacaaaaaaacacatacagaaagaagaactccttcatgaatgattttaccaaagattttgctcaagctctattcaatccagacaaaataaatgatttattgcgcaaagagctacaacaggctgttaataacttgctagaagctgaattgactgcctttctgggctatgatccctatgccagaaatggctggaatactggcaactctagaaatggtgcttatttccgcaaagttgatacgcaatttggcccaattgaagtgcaagtgcctcgggatcgcaacggtcaatttcatcagcacacgctgcctgactacaagcagcactcggatatcttggaaagcatgattatcaagctttactccaagggcgtgaccaccagggaaatagccgatctaattgaaaagatgtatggcagccattacagtccagctcaggtatcaaatatttccaagcagatgattccaaaggttgaggcttaccacaaacgcaagctaagcgacaagtttttctgcgtctatttggatgcgacataccttcctttgcgccgagaaacatttgagcgtgaagcagtctatattgccattggcatcaagcctaatgggcacaaggaggtcattgactactgcattgctcctagcgagaacattgaagtctggacagatatgcttcaaaacatgaaatcccgaggcttaaagcaagttgagctttttctttctgatggtgttgttggcatgaaaacagccttggccaggacttatcctaaagctcattttcaacgctgtttggttcatgtcatgcgcaatatctgcgctaaagtacgcgtcgacgatcgtgaaaagatcatgaacgaattcaaacaggtgcatcaacagacaaacaaagaagaagccacagctgtcctgcatgacttctataccaaatggggcaaggtttacagccatgttatcagaagcttgaaagacatagaaccagatctgctggtcttttataactatcccaagcagatcagagcttcaatttattcgactaacatgattgaatcatttaacaatgtgatcaagcgcaaagctaagcctaaggcagagtttccaactgaacagtcgcttgatgcttttattggcattcaggcaatgagctacaatgaccgttatttcaatcgaattcataaaggctttggtcaggttcaggacaccttagaatcctactttgattaaataaataattaaaaaatcaatttacgagaaagaactatttacacaaaagatttgacagtttccaaatatgtgttggctatactgaaaataatatacatattatcaacgcgtggtgctagttaaatctttctagacaataagccaaattataagctaaaattgcaatttccaaccggctttgaaagcctatcagactacgtgctcgattgttctcggcattgtaataggtcagaagcgaaaagtcgctttcaattgttctgcgaatagccatcaattgatgatcattgtgctttttagctcctgtcatatttttacgatatggtgtccaaagttcataacccatttgttttagctgttgatgcagttctttgcctaaatagccttcgtcgccaagaagatagtaattagatggatgggtattttccatcagttcaactgtctccctggcatcatgaactgatgcttttgttacgacataatcaagaatgtaaccgtcatcgctaacaatgacatgaactttgaaaccatagaagtaaattttcttggtggccttataaccaatgttggcataaccgcgaaaaattttagcacgatagttgcgaattggttggcaaacaggtaccggaaagctgtcaatgatcaagaaatgtccattcaggtcaacctttttattcatttcttgccgtatctgataaatcaattgcaatagctgacgtgaacgtcgattaaaacgtgagtgtgataaacaattgaaacattcacagaatcttctttgtgattcaattcctgtcttagcttgccagataagtaaagccaaaatcagactgtccgtagttttaatttgatcaatatttcgccgatgagtaaactcagccggtgcatacaaacgataccagtgccgacaaattatcactaaatctttaaaactaacttgtaaatggtggctaaaacgcttaagcttaaggcagttcaatcagatcaggctcttttctattattatacaagttgagtctaacaagattggacttttttattaactaaaacgatttaactagcaccacgcgtatattatcaatgaaaaagtaaagtaataatataactgaaccaattctatttaataagcttacattaggcctttcaagagtccatgggttagtgaattgaagtataaaatataaattttaaatatacagtggttgctagacatcaaattattaataatattatagtcattattatggaagtgaatgaattttgaatatgaattaccacattagacccgttaaccagaagatttaaaagatttgcaagctatttctcgcgaaacatttaaagctactttcgatgcctatacagctacaaatgatatggataaatttttagaaactaattattctgatgaaaaattgaggcaagaacttaataatgctgatagtaaatttttctttttacaagttggaccagaaattgctggatatttgaaagttaatcaagctagtgctcaaagtgaaaatttaggttccgatcattttgaacttgaacgaatttatcttcgacaaaaattccagcatcagggattgggaaaagttttatgcaaaaaatggatttaagtgctttagtcaacatacatatcaagttggaaatgatccacaaattgattatttattagagaaaaattataattaaaaaatctaaaataatggtaatgtcttcctattaatactccctatcgagatttctatatacttatctttcaaacatatgatttgttaattttattaaaaatctttttacatgataaaaataacgaatcgcttcctatgaatatacattatttgttaacatcgccttgatatgagatcaatgacacattcgcgaacatagttcgcaagtttcagaaataaatacctttatttccatattcttacagcattagatattggtggctttataacagtcttgtttcatactgctaaacccagccagtacctcttaatatctaatgccttatgtaaaggctcgtctgtgtcaagttttttctttatttaaaatactaaaagtaggtctgaatctttaaccttacttccgttaatagttttaccatgctttggatgtttcgttatatcctgtgcccagtctctgatatttagactagcgttataatctctaactaggacttgtccgcaattaggacaggtccattctttttctccaactttcaatttttcattaaccattccgcattcatgacaagctttactggtatcataactatctacctctaagagcaggtgtccatcgtcttggtaaatatattccatcatttttccaaatgaagctggctgaaaagtggctaatttatgattggtattttttcttagcccaatagtctttattgcgtctgcatattctcatagtaaaactgtcaagctgttccattgccaaaattgggtagttgatgctaaattccttagccttttgctttcttctttgataaacgattctttcagtttcaacagggaagggcctcgtcttcgtcactgtcaaaactgtcttcatcaaacaagctggtttggccggataaaggcatttgttcttaagacttgccgtagcgtttttgcgttaggtaggctacttgttcacgcaggagggcgatctcttcgtttaaattattaattgtagccattaagccttggatggtctcatcttttgtttcaactttagtcattgggatcccccctcttatttttttgataaactaaagcataccagaaacgcacgcaaaattaatagaaattgcgtgcgtttgtcgtttttattcccggttcgatcgagaagcccttcatcagccagtctacttgctcatccgataaaaccctgacttcattctgattgttgggccaaacaattttaccgttttcgaatcttttgtagagcagccaatagccttggccgtcccaatacaaggctttgaaacgatcacggctgccaccacagaaaataaagacttttccagaaaaaggatctaagttgaatttatctttgactatcgcagctaagccatcaattccgcgtctcatatcggtccgcccacagacaaaatagacctggcccagatcataaagattgatcatgacagtactttttccaaaagtttattcataatttcagaatccagggaactataaaaatttagttcaaggtcgcctttttcaagcattatctttgcccccttaagttttatgagacaaggataaccgaaaagtgggagctaaaaaagatacttaagtttttgatgcttacaatagtactaattgcaactagtgtattaaaaagctttttcatataatgataaaaaataagaggcagttatatcaactgtctcttatttgtccactttaaattaagcgttgaaagcatcagtaagtggtggaacaacttgcttcttacgtgatacaacacctggtaatttaacttctgaatcttcaagtttcttgtcaaatgctttttcaaataaagtcttagtctcgtcactacctacaactaaagcttctgagtcagaatcaagaatgttagtgaccaaaagcataaacatatcatagttgttgtcctttgatgaagcttccatagctttcaagaaagcatctttacgcttcaaagcatctgataaatcaacaacgttgatttgtgctacacgtacattgtgaccgtttaattcaaagctcttagcatctaaatcgattaactcttcttctgacttatcatcgatattagttccagccttaagcattgctaaaccgtattccttgtagtcaacaccagcaatcttagataaagcttctacagcttccttatcttcatcagtagtagttggtgatttaagaagcaaagtgtctgaaatgatagctgaaagcatcaagccagcaagtttttcaggaatttcaacattgttttcgttaaacatcttccatacgatagttgatgtacaacccttaggttctgcacggtagtacaaaggatctgcagtattaaaattcattattctatggtgatccacaacatgagtaaccttaactttgtcaatatctgaaacactttgttgtggttcattgtggtcaaccaacataacagatttaacttctggagcagcttctttaattacacgaggtgctttaaagccgaatgttttaagagcatatgcagtttcatcattaggctcacccaaggcaacggcttcagtgttgtaacctaacttgttttgcaaatatgaaaatgcaatagcagtgccaattgcatcagtatctggattttggtgtccaaaaacaaattctttttccattaaataaattgcctctttttctaattattttatttaatttcttcacttaatagtttactaaaattattgttcctatccaagttattgtctaagaaaatctgtaattccgttagtaatttcttcatcctaggaacatctaattttcctctacgataaacacaagcagtcgtaaactcaggcatatttttaatataaacaggagtcaaattaatctcatccttatgcgcctcgtagtaagtctgatctacataagtatcaagatcagtattttctgcaattttgatcatttccttagtagatgcaattttaaacggagtaacgagatcaatctttttactaaagttaagtcgcattaatcttgataagtagtaattctccggatatgcaacccactttctgttgccaaaacgagtaacagaatatgtcccttctgcttccacattatccttgtgagtcagtacaacaatatgctcagggcaaatatcacgatgattgtattgatgacggaaattagctcctgttttattagtagtatctggcatatacataatcgccatatcaatcatattggaatcaagtctgtgccatagctctttgcggtcaaagtaatcaacggtaaaagttacttctggatactttttattgaagtaacgtaaaaattggtagaaaagatcaacatgtacagactctagaataccaattgaaatattgcctttatctgactgggtatattcttgaatgtcactaataacaccattaatggtatttagcaactctatcgctgctgcttccatttctttaccagcttcggttaggtataacttcttccccatttgtccaaataatggagcaccaatagcgcgttccaatttttttacttgctgagttaaagccggttgggtaatacctaaaatttgtgcagcttgggtataattcatcgtctcaatcaattgtaaaaaataacgcaatgatttagccgataaaatagtatcacttttagacataacgattatctctttcctaaaatattattttacgataagccatgtcccataacactgctattatctatccaaaacagtgtcaaaacatatgtcttaacactgtttttaaagattaatatattgttttagttaaactcaaatcttaattttgactactaatgggtcttcccaattcaatacttacgggcgtcccatcaacggtagtatcaataacaaatgagccgttagaataacgatcgcctaatggataatccgtagttttaatatttacatgacggtcactagaagtagtgacatgtaacaaatgatcttgagcatatggcattagagcaacaattctatgcggtttattcttcaattcccgcagtactagtacccctcgcttggctctagaaactttattaactagtttaagtttgaattgcttaaatgccccacgttgagtaattagcccaacatgcattaaatcaacgtacttagaatcaactaggacataatttacgatataatcgtcatctttcaagttagcagatttaacacctactgctttagctcctgaagttggtatctcgctaacatcatatctaattgcataggcgcgatgagtaaataatgtgatttccttatgattatctgatttgatcaaatctaccccaaccacataactatcctttccctttaacttgatagctgtcattgcacgtgacttataagttctcgtcggctgtaagttagctaactccaattgtttgatataaccgtcattagtagccagaataaagttgcaatcagtattcaatttatcaaatacaaagacgcgaataatttgctcatcactgtctaatccaatttcttgtgataggtgttgtcctgtttctttccatttggtttcaattagttcatgtactggacgataaatgacattccccttattggtaaataaatacaagttagtcagggtagatagtgtgttttcataaactactttgtcaccatctggtaaaccattgtcatcatcattagttgactgatatgaacgtaaagatgaacgctttaaatagccatctcgactaattagtactctaacctgttcatcagcaactaaggctttttcatcaatttcaactttagcactttcttctgaaatttgagttcgacgtggattagcaaattctttcttgactgcatttaactctttaataatttctttttctaaagttgcacgatctgataataatttacggtatttttcggccaatttatttaacttgtcttgttcagcaattaattcattaacatccgtattagttaaacgataaagttgtaaagaaacaattgcttcagcttgtttttcagtaaatttatacttaactattaaattcttcttagcatcggctttatttttagaagcgcggatggttttaattacttgatccaaaatatccatggcatgaatcaagccctgaataatctctaatctagcttctgccttatctaagtcaaatttcgtacgtttagttacaacgtcttcttcatgttctaaataagaagctaaaattcgttttagcccaacttgaacaggagtcatgtgatcaatagcgaccatgttgaagttataagatacttgtaagtcagtatttttaaataaataatttaaaatattctgcgcatcagcatcttttttcaattcaatcacaattgacaaaccatggcggtcagtttcatcacgaacttctgcgattccatcaatttctttattcagacggatttcatctatcttttttactaatagtgctttgttaacatcgaatggaatttccgtagcaacaatttcttgcctatgcccacgaatttcttgaatagtggttttggcacggacttgaattctaccacgtcctgtcttatatgcttccttaattcccttagtccccataacaatagcaccagttggaaagtcagggccttttacatatttcatcaaatcttcaagagaagcatcaggatgtttcaacaaataaattgttgcatcaatcacttcacctaagttatgtggtggaatctctgtagcgtaaccagatgagatcccagttgatccattaactaataagttaggaaagcgtgcaggtaagactgtaggttcatactcagtatcgtcaaaattaagcaccatgtttacggtttgcttatcaatatcttgcaaaagcatattagagattttgcttaagcgggattccgtataacgcatagctgctggaccatcaccatccattgaaccattgttaccatgcatttcaactaacggctcgcgcatcttccagtcttgtgataagtgcactaaagccccatagattgagctgtcaccgtgagggtgaaagttacccatgatattaccgacagccttagcagcctttttaaatggtttatcataagtattactatcttgatacattgcataaaggatacgccgctgaactggctttaagccatctcgaatatcaggcaaagcacgttcttgaataatatattttgaatatcgtccaaaacgttcacccattacttgttcaagtggcatttctcgaattcgttcttttgtggccattaaatttaaaaccttcttttattcatcttcggattctagaattgagccgtcttcgcccattctgaatttaacattttcttcaatccactttcttcttgcggctactttatcacccattaaggtagtaactcgtctctcagcaagagcagcatcgtcaattttaactctgattaacattctcgatttaggatccatagtagtagcccatagctgttccgcgttcatttcacctaaacctttgaatcgctgcagcgaatagccacgtcccattttcttttcatcatcagctagttcttcatcagtccatgcatattgaacttgcgtctttttgcctcgacctttttgtaagcgataaagcggtggcagagcaatataaacttttccgtgttcaatcattggccgcatataacgataaaagaatgttaatagcaagatctgaatgtgagcaccatcatcgtcggcgtcagtcatgataatgactttatcataattagagtcatcaacattaaactcggttcctacaccagcaccaatggtataaatcatggtattaatttcttcgtttttaaagatatcctgcaattttgccttttgagtatttaatactttaccacgaagaggcaaaattgcttgaaatcttctgtctctaccttgcttagcagatccaccagctgaatcaccttcgaccaagaatagttcattctttttaggatttcgcgattgagctggcgttaatttaccagacaaaacttctttttttcgtctctttttaccattcctgctttcatcacgtgcctttttagcagcttcacgtgcatccctagccctttgagccttcttaactagttcctgagccagctcaccattttccattaaatagtaagacattttctcataaacaagtgaatctacagcagaacgtgcttgtggagtacctaatttacccttagtctgtccttcaaattcaagtaattcttcagggattttaacagataaaaccgcgctaagcccttcacgataatcagaaccatcaatatttttatcttttttacctagtagaccctgctttttagcataatcgttaaatgcacgtgtaaatccactacgagcacctgactcatgggtaccaccatcaccagttctaacattgttaacaaatgaaactaaattttctgaatatccatcactatattgacctgaaaattcaatttccatgccatcttgcttgccttcaaaataaaagacatcactaattgtgcctttaccttcgtttaaatacttaacaaatgatttaattccatcatcatactgaaaaacatcatgatgttctggctcacgctcatctgttaagacaaatttaacccctttaagtagaaaagcagattcacgaattctctcctgaattgtctcatacttatacttcgtggttgaaaagatagtctcatctggcttaaacgtaatggtagtccctgttggctcttttgtctttcctacacactttaatgtacctaccggatgcccaccatctttaaattcttcttcataagctttaccatcgcgaacgactctaaccttcatataacttgaaagtgcattaacaacggatgaacctacgccatgcaacccgcctgaagttttataattttgttcagtaaacttaccaccagcatgtaatacagttaaaataacttcaattgtgggcttacccgatttgtgcattcctgtcggcataccacgcccaaagtctcttacagtaacactattatctgaatgaatggttacatcaatttctttaccaaaaccagccatggcttcatcgacagagttatcgacgatttcatacactaattgattaagaccatgaatatcagttgaaccaatatacataccaggtcttttacgaacggcttctaggccatgtaaaatttgaattgaagaatcatcataagtattagcttttgccactaaaattcctccacttgttcattaatttaaccagcaccatatatttaaaagataatctttgctaaaatagcgatagattaataggagtgttgttaaatatgtttgcattaaaatttgcatcgttgtttattttagcatacttgattggatcattcccaacaggtgtgttagtgggtaatatcttttttcataaagatattaggaaatacggatctggaaatatcggaacgactaatacctttagagtattaggaccagctgctggaatcattgtctttatagtagattttctcaaaggaacttttgctacagtattaccaataatttttaaactaggaccacattatctttgcttgatttttggcttagctgcaattttaggccacgcttttcctgtctttttaaagttcaaaggaggcaaggcagtagcaacttccgctggatttttactaggatataatgtccattttttcttgatctgtgcgttaatcttcttccctatcttatttattacaagtatggtttcattaactagtttgatctcagtagttctaatctttattgcttcattctttttccacgatcttgccttgagcattatcagtggattgctcgtaatcttaatttactggagtcaccgaagcaatattattcgaatcgaacatcaccaagagaatctggttccattcggtctagtgtattggtataaaaagaaacatactaactcaaactaaaattataaaaccagcaagcatttagcttgttggtttttgtttacctaaatattatacttttgcaaacaatagttcgcaagtacaaacaaatatttttattttattataatgatctatttatttcaaaatcttaattaaatcgtctttactcattgttgcatcagcaatctgatcattttgcaaaattatatcagctaattctgctttcttttgctgtaaagcaatgattctctcttcaatactgtcttctgtaaccatcttataaatcttaacagaatgcttttgaccaattctatgagctcgatccgtcgcctgtttttctgcagccaagttccaccaaggatcataatgaattacaacatcagcaccagtcaagttaatgcctgttccgcctgcttttaatgaaatcaaaaagacccctggttgagccatttgattaaacttttgaacttgttcttgacgcttagttttaggtgttgatccagtaatagtaaataaaggtagtcttaatctggcaaggttttcatgcaaaatatctagcatagctgtgaactgtgaaaacaataaaattttatgtccatttgctagattattcttaatcaactcaattgtagcaattaatttattagacttgccgtgatagttttcataaagcaaatgaggatcacaacaaatttcacgtaatttagtaatctgagccaaaatttgaaaacgtgatctcttaaagtcttcatccccctgtccatttaattgagcgataatcttttgcgtctgcatattatacaaatcagcttgtttcttattcattttaacaggcacaatttcttcatctttgtcaggtaagtcacgtagcacatctttttttagacgccgcaagataaagggtattatcatattagctaattgatcttctgcttctttatcttgctctttaacaatcggtaattcatactttttcctaaagtcaggatataaacctaaaaaacctggcattaagtaatcaaaaatactccataactcgctcaatttattttcaatcggtgttcctgttagagccagtttatgatgcgctttaatgactttgactgtcttggcggtaactgattgctgattcttaatattttgtgcttcatcaattacttctacatcaaaaattagattttggtacgcttctagatctcgattaagcgattgatatgaactgattagcagattatactttttagcatctaaaagcaatctctctcgttcttttttagtgccatctaatagagccacattaaggctaggtgcgaactttttaacttctgcctgccaattatagataacagaagcaggcgcaacgattaagctaggtaactgattttgcattttttctttgcgagctaaaagaagactaataatctgcaaggttttacctaatcccatctcatcagcaagtagcccgccaaatttataattaacgatagtgcttagccaattaaaacctatcttctgatatggacgcaaaatattttgcaaactaactggtatttgattttgcttcaactgattcttagctaaatcattaatcagagtattaaaggattcattagttgagaaatgcagtgcattagcagctttcatttgcttagcaaaataaaaggcacgatatgctggtaaatgtaatttaccgtgaatgaaatccttaaaactaatacctaaatcatgcaaagtttgtgccaattgttcaattgtcggttgttctgccttagctagcattccattttttaaaacaaaatattttcgcttttcttggtaggctttcaaagccgcttgaatgtcttcccagctcatcttttgatcagcaagatcgatatctaataattcattagtcaggttgatacctactccaacatccaaattaatctttattccctttaaaagtgatctaaagttagctgtaatttgtacttcgcctaatcgtttcaactcattgataccatcatctagaaaagcttgtacgacatccgagtcttcattggataaaacataccgcccatgctgataatcactaaaatatgtattaatgtgcttccatgctgcggtctctttttcaacatcgcgtcggtcctcttcagtatatccttgatttaactcgtattgtgcatccccatactgtactcgagccacacataaaatactgcctacacgataatctaatttaaacaaaaaatgggcctctggtggcaaaatagctttcaattcatcagtaccagacactaatataaactttgtttgctcaaatttaggcaaaatattatgtgcaaacttagcaacggtctttttactaaattgcatttcagcaccaggctgcaatcctaaattatgcaaagaagcaggcgtaagacctatatatttgatccatacatctttgtaatagccataatacgcatgactcccagtaattatagtagaaactggaagatcctctacactaactaaagcagatgacttttgagtttcaattttaatgtttaaatctagttgatcagttgtatatcctataggctgctcatttgagtacaactttacgccttgataaagtaaatcattaacttcatcggccacagagttctctagtgtaatgcgaccaacctgactactgtaattataataaaattcttcgtttagattacgagcatctataattttttcaataaaagataaccagtgttgactatcaatatccattttagcctgatttataggctcgttgaaaaacttacctagctttagagaagagctgtgtcgggatgcatctactagttgattaagatctttaactttataaagatgcttgttctttcctaatttaaacgtcaaactagggatgttattatacttatcaatacttgcccgcaaaataatcggctcatcattttgggtagaagcgtcactataaaattcaagtagatcttcagcggcctggttagttaaatcaaatggatcgtcatcaagatactcattaataaagtaaaacagagctaatattctaacactatctttttcaatacgggaaaaatcactatcaaatttaattgatataatttgccagcgagtaaattgcacagataatgtaattaactcattgtcctctgttactatctcccaaaaatattcatatttacgcatcttatcatcaaaatgccgacaactactaatcgaccagtgatcattaagttccagtgcctgatcataactttttttggtaaatttcatattgccaatcaaatttaaggggttaagtactgggcttttatgtgcaatcatttgcttaagatgttcagaaattaagtcagcaaaagggactttaacgttatgttcattttcttgttcgttttctactgcaagtaaagccgcaacctcgtgtttacagcgatgccctttattagcccatggacaattacagtctaactctgaagctcgaccatctaaacgaagacgaccagttacagtataagaacgacccattccgccttgaacttgagcggtaaagtgttcctgatcttgagctaattgaatattttcaaccatatcattgccataatatatttctccacgatcaaaaactcgttcaggaaataatctatgccatctagacatttacatcacgctctttcataattattactacttacactatcataattttttagttgttaataataaattgtcacaacatttttagtgagcattttattattaacaaatcatgcgatgatcttataataaaagtatagaaagtacagtattatcatatagacttatataagtatcagctaatgtaaataaaatacagaaaggaaataaaaatgactcggcaattaaaattgctgaagacttagattgctatacagaactactttctggaattacaagaaaatttcagcagtttagttatcgtaagctttatttatatgatattcaaaaaacaattcgtattttaaaaatctaccaggaatggcttttagctcaatcagatcaaaactttagcaagctttatgataaattttgggcacaatgtgaaatggatattacagccgtctctctactgcttgtgccaaacgtacatgataagaagcaggaaatagaacgcatagatcatttactcaatcaaattaatcaaattgggacatcatatttactaaatgacgttcaaagtaacgctgtaggttccgccatgaacaatgctatttatccggctaaccgagctggctagagcaaatttatcaaaatagtcaaagtgaaaataatattgaatacaatcataaactgcaaaatttcttaagtgttcattcagagccttatcctgatgcggatacattagttattttctttactaatactaaataaaagacattggccgtatttaccaatgtcttttatcatttttcgttttcattaattcttaaaggatataacctatcatcatgttctgcaggagcatcttcttcgagtaacaaatcatgattaaccaattctttctttagtcgtttcaccgtataagaattgcaatgcatgtcatccattagctcttgattagaataaataatatacatattaccgtcagcatctacccatccattggtttgtgaatcaatcattctcatcgtaagtatcatgtataggtatcatgcatcggggcttaacttcttatacttgggattatgaaaaaatgcttgtggtagcccattttgctgttccgggtagtttccgccctttttaaatttacgaatatttgtatacattttgacctcttcactttacatagctttttcctttacattaattataatgtatatttttattagatagtaataattggacttactagtaaattatgcaggccattaaattaatcagcaatattcgcacctaatgcatttttaaagtgagccattgcccattcatcgccatttgatgtaaaagtagcaacagcagaacgtggaattgtaatttcatagtctaaattatatgccgcaatcgctgtgtgcaatacacaaatatcagtacaaacaccagttagtgtcaggtcatgaatatggcgttcacgtaaataattatctagattagtattttgaaaagctgaataacgatttttatccattaataaaacatgatcattatctttgttttctaaataccatttacccgtttgaccatatacttcacggccagcagttccaataatattatgcggtggatataatttagtttcagggtgatatggatcattttttaagtgcgcgtccatcgggaaaatcacccaatctttattttgtagaaactgtttacacagttctgtaatacgttgatcaattgcttgagcaggctggccacaagtaagagctccatcatcagctacaaagtctttactatagtcgataactaataacgcttttgccattattttctcctttataaaataatatttaaaatatacataattaaattaattattgctaaaatcactattgatataatgaataccaaataaatccagacagtaatattaactaaaaacggtaataatgcagcgtgaaagcctagaaaagaaactaagagaagcataataaaggttataccaattaatcctaaaaaagcatatttgccactacttatatcagcctcgcttaaatcgaatccaccaaaacatagactgattactagcaataaagcaacaattgagtgccatattgaatcaaaattaagctgaaataattcaaaaatataaatccaactatgagttaagaaattccagttaagtgcattaccattacttaataactgagtagtaagctgattctgaaccaatgaaataggtgtattcaatgtacgcatgattatgtaaatcagcaaggtgcatcctaatacaggtgcaatgccaataaaagcattacccaccttttgataagtagatgtaggagaccaagtatgtttaacatagccaagtgacatatcattggtattactagggatgcgcaataaactaaccgcattaatatgatgaccaaaaattatagccataatcaaatgactaagttcatgaacaataattcctaatccgccaacaataatttgactattaaaaccaaatgtatttaccaatttttggttagcttcatggcttaattgtcgtaatgctaatacaaataaagccggaacgagtaacattaaaaaagtcccattaagggcataaagaatatgtttcatctctgatttaaatttgttttacatattgagtcaataatgttaatgccgcaaaaagctgatcaattacgccatcagttgcactgaaatcagttttaacaaactgaataacccaattatttttaattggaattaaacgaacaacttcatcttgaccataattaagccgtaaactattggctaaaatcacttcacgataacgatgtccatcacttcctagccactgtgttgtttgatcagtactttgcttaattaggctataagctttggatatttttcgcaacttattacgcagatcaaaccaggactttatttctactaactcactatttttaacatattcagataattgcatgccttcttgactttgcgcaattctttctaatgtagttaaggcaatcgccatagatttgagcgaatcaattgaaagttgcggcattaaaatttggattagccaattgtgactgaattcatcaggtggatacagtcgactaacttcaagattattttcaaaaaatacacgatatgtattcttacttaggctttcatattctttttcaccatcttgagtgcaatacgtcaaaatgacattatgtttaatttttcgaatggcaaaattatcgtctgatgaaaaaattgtactttcaaattctgtaaaatctgtcattaaattctatctttcgtctataattttatttatcgtgtttactaaaatatattgctctacgcttttttaaactagcaataaccttatcaatgtcttcatcagacattcccctgcgtttggcattgtttcgccattgtaattcactgattggagcacaactaacagtattcaaattcatccatatccagagcgataacaaactacctgcaagacctactagcacaaatgtaccagtaataaaagttaaagatcctacgaaatgtgatacgctccaaagccaaccgaacaaggttatgatatataaaataggcaaaatagctggacgatgattttttccatattcagcattcgggccaaagaaagtttgccaataacgaggtattgagcgattaattactaaatttgctaatgctaatagtaagcaaattagtacagaaacattagacttaattaataaaatactaatagctgacagaatgattacataaaatgtagcaaaattagtagaaaagaaaacccaacgtcgaaatttagcaccattgccaatgattattgcttgcttaggatttaatgttgtctggaaaaacattttatcagttgagacagtttttcgattaaagatatcaaagtgcatctaattctccttacaagcttaattttactacatttctagctatgacttaaatttcaaaaataaaagcggcttacatctcgtaagtcacttccgttaactaattttcaaaccaattccaatcatcgccaaccacgtcaactttagcatcatcggcagctgctgatctgattttttctgcttgagttgggcgttcaattgtgaagccattgttagaatctttttcaaccatgccttcaaattcaactacatcgcccctcttcaaatcaaggtctttgaaagttttcaagtaatgcagtgctaactgcttaacaattggattgccaccagcacctgcaatacgcaaatccttaaaaatagctaagcgatcgtttaatctatcaaaagtaccactaaatttatgacgcttaccatcgtcgtatggttcaagtttttcattgtaaatatctacagacatatgtacataatcttctttctacctctctaatataacattgattttgataaaataaagaggctagataaataaaaatcactctttaatccgattttaacgtatacttttaactgtaacttaggagagaaaatgagcatttattatcaatttggaattattataggtttggttctgttggctttcgccattcacatcgcaatgaaacaacataaaactacctttccattcaacattgtcaacttaggcattgcattcataatctcaacattagcaatttatattattgtagcctgtctaggagcaattcaaccgcaaaactggtacaccaataatgcattatggaaatttttaatagctagttaatcataattgagaaaatctaaaaaagattttctcttttttattaaaatacaattttatttttttattaattgattaatcgagactgtaaaatagtttgtgtaaggatgaatgattccttaaatttatttctttaaacattagaaaaaggagttcctttctcgtatgattggtttgaacaaaaaaacacatacagaaagaagaactccttcatgaatgattttaccaaagattttgctcaagctctattcaatccagacaaaataaatgatttattgcgcaaagagctacaacaggctgttaataacttgttagaagctgaattgactgcctttctgggctatgatccctatgccagaaatggctggaatactggcaactctagaaatggtgcttatttccgcaaagttgatacgcaatttggcccaattgaagtgcaagtgcctcgggatcgcaacggtcaatttcatcagcacacgctgcctggctacaagcagcactcggatatcttggaaagcatgattatcaagctttactccaagggcgtgaccaccagggaaatagccgatctaattgaaaagatgtatggcagccattacagtccagctcaggtatcaaatatttccaagcagatgattccaaaggttgaggcttaccacaaacgcaagctaagcgacaagtttttctgcgtctatttggatgcgacataccttcctttgcgccgagaaacatttgagcgtgaagcagtctatattgccattggcatcaagcctaatgggcacaaggaggtcattgactactgcattgcgcctagcgagaacattgaagtctggacagatatgcttcaaaacatgaaatcccgaggcttaaagcaagttgagctttttctttctgatggtgttgttggcatgaaaacagccttggccaggacttatcctaaagctcattttcaacgctgtttggttcatgtcatgcgcaatatctgcgctaaagtacgcgtcgacgatcgtgaaaagatcatgaacgaattcaaacaggtgcatcaacagacaaacaaagaagaagccacagctgtcctgcatgacttctataccaaatggggcaaggtttacagccatgttatcagaagcttgaaagacatagaaccagatctgctggtcttttataactatcccaagcagatcagagcttcaatttattcgactaacatgattgaatcatttaacaatgtgatcaagcgcaaagctaagcctaaggcagagtttccaactgaacagtcgcttgatgcttttattggcattcaggcaatgagctacaatgaccgttatttcaatcgaattcataaaggctttggtcaggttcaggacaccttagaatcctactttgattaaataaataattaaaaaatcaatttacgagaaagatctatttacacaaaagatttgacagtttctataattttcacaatcttagtcattaaaaataacattattcagtttaaaaacctgaagtatatggactttttgataaaagctattatctatgcttgactttacttcacaaagataagacaatgactgtgcagtatatgaaagcggatacaatataaatggtatatctatttttgaaagcatggggaaaataatggatagtttattatttacaacatatgaccaaaataaaattaatgaattacaagataaacttaaccagcttagtcttcctatcaaagtagttggtttagctgaagtagattatgcaccacaaaagtcatattctgaggcaacatttttaagtaatgctagagctacagcacatcgtttagctgaatttaccaatttgcctacattatcagaaagctcaggtctaagtgttgattatctacttaactctttaggaatcttgccttaccaccataatggtcaagatgataaagctaaattattaggctatttaggtggagtttctagtgaaaaaaggacagctagctactacactacctttgtctttacttggccaggtcaagaaagcaatgatattgttagtgctggtagaatcagtggattaattgctaagtatccacatggtagcagtaactatggttacgatgctttattcgtagttccagaactaggaaaaacctttgcagaaatgaatctcaatgagagaaactcaatttcgcaccgcaataatacattaaataagttattgtgtgatttacccgattggtgggatgctcaaaaatctgctcaggcaattaataactagctcactttgaaaattaaactggttaaataatatctacttacttaattcaataacttcttaatactaataaataaatcctaaaaaaggtaggtcaaaattgacctacctttttgtttaagctttacataattaaaaatatttttataaatcttgatccgtcttggtcaaatcactacgatctgaaatccaaacatatagcggcaaattaatcttacctttttcatcgattgcatcaacgactttttcaatcaaaaattcttgccatttctctgcaggttgcatccctgggtgacccaattgtggtaccaaccatccatttgctaatggcttacctgtagtcaaatctacaatcatgccgacagtataattataaaaatcaaaactaccttcaactacaatccaattactactattcatcaattcagattgcagcttagttaacatttccggcggaatctttccttctgtaaccatcattctgcccttaattggaccatttttcttttcgaagtcttgcaaaacacctttcataaaaagcttttgccctaattgatcaaattttgtttcatcttttaacataatcatgtccgctttctttagaatcagtatccattatactaaaatttgtttagtatcgtatcttcacttgtaaattagagtgatcacttgtgtcgtacagcgtctttagatataaccgatactcaggatggtgcttaatcaaaacttgatattctttagaagcatggattttattcaactcgctagcctttatatgattatgaccattaaagaaatgatagttcatccagccaaacaaattccccatcgccctaactaactcgatgtcttcgtgatactgatttaattcactttgcatcatatccgcagaaatactaccaagctgtagatcttttaaatacttatgataatgaactaaagtataattttccttttcctcatccgttaaatatcttgtcatatcaaaattacgccgcacatatgtaatgtgccgtgaatgaactcgcactactccatagccttgatcattagaacaaaaacttgatgtaacgatctcagttgtaggcgtcatgtcttgtggtcccataatattttgagcatgaatatgaccagaaaaagctaatttcacgttgtaacgcgcacacaaacgtcgtagctcaacagcgtcatcaactacatagcccttgttaactgctggattatgtgcatataaattatgatgcataaataaaaccggacgtaactgatgttcctgcgcataacgaaattgtttttcaatccattttaattgtacttttccaatttcgccgtgagtgtgcggtgcttctgttgtctcttcttttccataaatatttgaatccgctaaaactaaaagatattgcggattcagttggacactgtaagccaatgaattatcgtcttcatctaaggcctcacgatatgatttatcaaagatcgagcgccaaaacattgggctaatttcaccagcatagaactgttttttaccacgaaattctctagcccacccatcaaaaatgtcgtgatttccaggtaaaactaacactttagtttctttcaacggcttaaaaatttgagcaaatttctcagcagaaactcgttcaccgttaaatgtcacatcaccagttacaataattgcggcaggcttttttctttgtgccattcgcataaaagcagaaagggctatttcttgataatacaaatccttaccttgactagttttttgcatgcgtgaaaaggcttgtccttcatcatgtaaactatctgcgattaggtgcgtatctgagatcacccaaaattctgtgttaagctcttttgtaatcatttcttaccttctgttagcccaatactgatagaaatcaacccgcaaatttccgttaaatagtttgcgcttcttagtagcctttgcaccaaaacatttttcaaagttaggatctgcagttaagtaatactgactgaacgaactaagcggtctaagtacttctcccatttggcgatacagctcttctgccgactcacgatccttcaatcgcttaccataaggtgggttcgcaattataattccattttctagatcagtagtaaagtctttaactgcgatttgtttaaagcgaatatcttgcaatacacctgcattgtgagcatttaatttagctacttcaagaacagactgatcaatatcactagcccaaatcggtgcttcaagcggcttaacttcactcttagcctttgccaatacttcattatgtagtttagggttaaaccagtcaaaaccatcaaaggaaaatttacgccaggttcctggtgctatatttttagcaattaatgctgcctcaatagctaaagttcctgaaccagtcataggatcaattaaggggtgagtaccattatatggagttagttttaatagcccggccgcaaagttttctttcataggggctccaccatgctctactcgatagccacgtttaaacaaactagcgcctgtagtatctagcgaaattcgagctacatttttataaatatgaatatctaagggatattcattaccagtttctggcaaaaagccacgacgatggtactggtcaaccatcttattaacaattgccttttttacaattgactgtacatctggttcagagtgcaatttggattttacagctctaccttgaacaggaaacttagcgtcaacaggcaataattcggcccaatcaaaatcataaatctcattaaataaggtatcaaaatctgttgctctaaactcttttagcaaaattttaattcggtcagctgttctcagccaaagattagttctaactatatcttcttgaccacccttaaaaaagacacgaccattttcaacacgggtcttataccccatagactgtaattctttattaacgacactttcaaaaccagcgcccatagttgcgtaaagttggtattctttcattgttactctttcattttcaaaataaaaaagagctggacctaaaagcccaactctgcctgtgtgaatttctataagccacgttttgttccaataatctctggcaaagattaccttcagtagtcatctatctttactgcttaaagcaataatccgacctttagttcatttccttaggccgaaactcccccaccaaatttgggtttcacactcgcagggtttacctcgttccaccaaagtcatttctgaccttgcttcgtcactgtggcacttttcaggatagtaatgcatgtccgaagatttagcactttttccgccgtgaagactaacgtcctcctccagcttgttaggctgaatacgatcactacaaacatcgcagtctgtgtgtgcgtggactttcctcagctaacataagctagccgcgcctactcaaaattcacactgttagtcattatagcaaaaattaatgctttaatccataaacgtgttgttctagattataaacttttctttccaaagttgaaatccgttgaataatagccatattagtcgaaatttcaccttgagtatcatctgcatcttctgcaaacttcacaggcgcacttcttctatgcgttggcatataagtcttaaccttttcttcttcagcctcaactgttttctttgctttttgcttttcatccattaattgacgttggagcgtaccgatctgaccatacaaatcttcgataatttgttgaaaagtagtataatcagaaattacttcatctaagtatgcatcaacttcatcgggatcatatccctttactttacttttgaattgtttctttaatatatcttgtcctgataattttatatcatttaaatttgccatcttactgacaactcctttacattccaccctattttagcaaaaacaacgctgactgaaaataaagaaacagactttaataaaatttttaccatattattcagaaaaatgatttatttgatgattttcttggtattcttcagctgcatcttgtaaatcataaaaatcaattaaatctaatggatattctttagtttcctggtatttttggattaaattataatcatatttaggtttacctgggtgctctgaatcatagatcatcaatgctcgatcagtatgctgaatcataaaattttgataattacgtaattgaagtggactttgataaggggtattagaagttgaagcaaaaaagtccactttttccttcaaatttaagaatttagctttgttactatcattccatcgattagcaaattcttcatatggaatcattattgatgttcttaccggatatttttctcctaattcaagtccaacctcagctgtccactgttcgacaccgaggttagctccagtaataatccagtccaattgcccatcatccagtagacttgtcagataattttttagggcatatttaatgacagttatcttgggatcacgatcgccaaaaacatttaattcatagctgcgatagccagtcacccataaacgctgcatttgtttaagcccccctttatgttcaaaaatgtagtctttattgctataatgctaacaggagtgaggacaatggtcaaatatcctagcggtagtttagccgcatttagaaaacctgtaactaaaaaagatgaacatccagttcaccgatcatatcatcataaaaaaggtgttaacttttctgatcgtgggatgacacttgagcaacaaatcaatgaatctaataaatattatttaatggaagaaattgcagttgttcataaaaagccaaccccaattcaaattgttaaagttgattatcccaaacgttctaaggcggtcattcgtgaagcttactttaggcaagcttcaacaactgactataatggtgtttataaaggatactatctcgattttgaggcaaaagaaacacggaataaaactaacttcccattaaaaaactttcatgaacaccaaatttttcacttggacgaatgcttaaaacaacaaggaatttgttttacaattattaggttcgctagcttagagcgctactttgttactccagctagttttgtaattcgagcttggcgaaaaaaagataaaagctcaatgactttaaaagaaattgaaaacaattcttttgaaatcaaaagtggctttcgtcctacactgccttatcttaaggcggtagataaattcattgcagataggaaaagataatcatggcagataataacaataatatgaaacgagaatcacgaagagactatcatggtcgaaggccaagtagtggccacttatggattagaatcattaaatggatctttttgctgatatttttaatagtaatctctggaatcgggctttttgctttttatgccaaagatgctcctaacattagtcaggaccaattgcagagtggtaaatcttcaagtctatatactaataatggtaagtttttactatcacttggttctgaaaaaagaatttatgttaaaaataaagacattcctcagcaattaaaagatgctgtagtttcagtagaagacaaacgtttttacaaagataagttaggcgttgacccaattagaattattggttctatgttaactaatgccaaaagtaatagtattgctgcaggtggttctactataacccagcagttagttaagctaacggtcttctctactgctgcttctcaacgtactctgaagagaaaagctcaagaagcttggttagctatgaaagtccaacatgaattcagtaaagaccaaatcttagaattttatattaataaagtctttatgaactatggaaattatggcatgggtactgcttctaactactactatggtaagccactaagtaagttagatttggcacaaactgcattgattgcagggatgccgaatgcacctgttgcatatgatccatatctttatccgcaaaaggccaaataccggcgtgatattgttttaaagactatgctacaaaatgacaaaattactaaagctgagtacaatcaagcagttgctgaaccaattagtaagggacttaaatcacatcgaaataataacgagtctaagattagaaaaattgatgatccatacattaaagaggtaatttctgaagttaagagcaaaggctttgatccatatcacgataatttaaagattactattaatatcgatcaaaaagctcaaaacaagctgtacgagttagctaacaacggttctgtaccttttacaaacaataaaatgcaaattggtgcaactgtagttgatccaaacaatggtcatgttgttgcaatcttaggtggacgtcacttaccttctgttcaattaggattagaccgggctgttcaaactggacgctctaccggttcgtcaattaagccagtacttgactatgcacctgctattcaatacttgaattggtcaacagcaaaaatgattgatgacagtaagtatgtttatcctggtaccaatatccaattatatgactgggacaacaaatacgacgggatgatgactatgcgacatgcattggagcagtcacgtaatgttccagctattaaaactcttgctgaagttggagtaaaacgggcttcagcttttgctcgccgaatgggcgttaatgtttcaccaaaatctggtttatcagtagcaattggcgctaatgcgtctagtttacaaatgactggtgcttatagtgcttttgccaccatgggcgtataccacaagccgcaatttgtttctaagattgaaacaccagatggattaaccagaaattatgattcaaatggtgtacgtgtaatgaagaaatcaactgcctacatgattaccgatatgcttaaaggcgtaatcaaacgaggctctggtactaatgcaaaaattgcagatctttatcaagctggtaaaaccggtactgttaaatactctgatgaagatctagctaagtacccaagctataattcaactccaaaagattcatggttcgttggttataccagatcatatgttatgggtgtttggactggttacgataatttaaaggacggtactatttctggaataggtcaacaatctgcacagctaatgtataagagtatgatgacctacctaatgaacaataagcctaacctagactggaaacagcctagctcagttgtaagagcgaaaattgtaaataactctaatcctccagaattagcaactggtggcggcacttggcaattatttgttcgaggccataccccagccggaattggtaatagtgcagcaagttatgatgaagacgatgaagaaactgatacttcaagcgataatactggaactactccttcatcttctagaactgcagttactcaatcatcatcaagtcgtgaaaatggctcatcatctcaatccaatagcagtcagcgagcctcttcctctcaaagaagaacacaatcttcttcaacacaacaaagttcatcaacgagaaaacctgaggaagaatcacatgaacgtaatgatgattcggataatgactaggcaataattaaatatatttattaacagatagcgttttgttatctgtttttattttggccgaaacgtagttgaggcctgaaattataaaatcaaaatttagtaacaacagattatataaaattattcaataaaaaaagccgaatttatttcggctttacttttcggaatttaaataagaatacggatcgcctttagctcgagctggcattgtataacgaccaaatagaatcatcgcatggtgcgtttttatccattcacttttaggtaaaattgcttctaatcgcttctctacttcatgtggagtagctttgtcatctacaatatggaactttttagaaatccgtgacacatgagtatcaacagcaatagctggcacaccatagccttcagccaaaacaacgttagcagttttctctcccacccctggtaaggtcatcaataactttttatccttaggaacctgtccattatatttatcgaccaaaatttgcgcagtggcctttaaatgtttagcttttgaacgaaatagaccaatagtttttatctcatgctcaatctcttcaattggagcttttgctaatacttctggggttgggaacattttactaaaactaggcataacacgattaaccatcttatcagtcgtttgtgcgctcaacataaccgcacaaagtaaatgaaagttagtatcccattgcaattcaccttgtgcgtcaggatacaatgctaaaatttttttcaaaactctacgtgcttcttcatcactcaataaatcttctgtcatttttatcgattccttttcaaaaatctctcaacttcatcagttgttttcagactatgcctttgccaattaagtaaaacacgatcaatatactttaaagaatatgcctgagacaatacagcctctcgcaaagcaagttcaattaattcaggagcatagtgatccacacttaaccattgcgcaatctcttctcgttcaattggactcagatagcgaccaaattcaacttctacttttcgtgacaaataatttaacggattattttctaaattattagcaactgaaacagttttatcttttttcttatctttgatcaagacgttttgatcaatatagtgatcaagtgcattatacaacttattgagactatatttattaccaattttatcctgactatcagtcatttgttcaatagttaaataatttcgttcaattagccgctgaataagattacccacatcactaaccgataaattagtattagcagcaatcttttcattagatggaaaactctcacctcgttggctaaatgcttccaattggattatcaaaattagttcagcatcactaatgcctaattgagggtagtaagcgatcaatccattttgtaaggttgtaaagcctaatgcccgataatcattaaattccaaaataatttcctttcaaaaacaaaagttgaactaataactagtccaactttgtgtatcaatatttaattattaaccaaattaaggttgcattctgttaatcaatcttgggaatggaattgcttcacgaatgtggtcaaggtgacaaacccaagcaatagtacgttcaaagcccataccgaaacctgagtgaggaactccaccaaatttacgtaagtcaaggtaccattggtagtcttctaaattcaaaccagcgtcaagaatttgttgcttaaggatttcgtaatttccttcacgttctgagccaccaaaaatttcaccataaccttctggtgcaattacatcagcacataagtattccttaggattatcaggattcttcttcatatagaatggcttaattgaggttggatagttgacaatgaagactggacgatcatattgttctgaaatatagccttcatctggagcaccaaagtcatcgccccacttaatatcacgtccagcatcttgaagcattttaattgcatcatcgtatggaagacgaacgaagttaccttcagtagttgggcgaagtttttcaggatctctaccaagaatcttaagttcatattcattattttctagaacttgcttcaccatgtaggcaagatatctttcttgaatatctaacgattcatcttgatgcatccaagccatttctggttccatcatccagaattcagtcatgtgacgacgaccctttgattcttctgctctaaaagttggaccaaaagtaaagatcttaccataagccatagcaccggcttcaccatacaattgacctgattgtgaaagatatgcatcgtggtcaaagtattctacatggaataattgagtagtaccttctggagctgaatgcataaagataggtgcatcaaatttgataaagccttctttttcaaagaaatctacagtagccttaaacatggtatttctaatttgcataatagcaaatggtttctttgatcttaaccataagtggcggtgatcaagtaagaagtcaacaccatgttccttattaccaattgggtaaccttcattgtttgaaaccacttttaaatcagtgatttgaatttcataaccaaagtgtgaacgtgcgtcttcatgaacagtaccagtaatgtaaaaacttgcttcttgtctaagtgacttagcagcatcaaatacttcttctgatacatcattcttacgtactaccccttggaaaaatgcagtaccatcacgtaattgcaaaaagataatctttccgcttgatcgtttatctgttaaccaaacatgcatcttgacttcttcatcaacatgtttagaagaatctttaattgaaatcaattctgtcataaaatcctatccaccttttcatcaattatacagtttccataataccaaagtttctataaattatcgacttctgagatatcatttccatttttgaattcatataaagtataacctagattgccgttttgttttttgtaggccacttcccaaacgacctcacccttataccaaccaagattaatattatttattgtagcatccgtatggatagatttaaacttatttttaatcttagattcagtgattcctttggccgcaggatatagatatgcctttttagaatttggcaaataaataaagtaatattgttttcccttattattggtgcctgctatagcatagctgctagtgccgcgatctaaatgataatagttttgaatctttctaattggtgttttactagtagccaattgcgtaactttttgatcattgccccgacttctagatccagcataataaaagatagcaatgctggctagaaaggcaactattatcaaaccaattacccaactcacaaacttgattgtttgtcttgtatcatcttgtaacataattatttattttctaatttcttttttaattcttctctagtaaccttttcaactttgacaggaatcgtttgaaggaactcttgaccataatctttagtccataatcttgggtctaaaattacaaattgaccatgatcctgttctcctctaattaaacggcccattccttgtctaaaacgaatgacagctcttggtaaactatctttagtaaaagaatcgattccctgatcttccaatttcttctgccttaaacgaacttcaggttgatcaggagattcaaacgggatttttgccgcaaaaacagtatcaatcccacaatcatgaaaatcaattccctcccaaaaactatcagcaccaattataattgactttttagcaattacaaacctcttagcaattcggttattggaaccagacaatccctgggctaagatttcaaaatcttttagctgtggctcattcataatcatggtaaaaacagttttaattttttctaaattagtcatcaaaacaagtacatggtgcttatcttgaatgtcactaagtaaaatttgtgcaatagtcttttcaaattcttcactatcagggctaggcatattattaactgccagtacctgtaaatgcttttttatattaaaagtacttttaccaatatattcaaccggatgtaattctgttaaagctaactggttgattgcatattcaaaatttcgattactggttaaagtagcactgacgaaggcaatatggtcaaaacgactatagatttgttttaatacttcaccagcatcaagcattaaccagtctaaattggtacttagtggatcatcaagattagtaatcatcaaaataaagccatcttgctctaaacctttttgatcagaaagcaaatcagccaattgatagcccttttcagagtaataatctaggcgatcaatttgttccgtaatctcattgactaatacctcaacattagccagcatgcgttcttgttcattatataattcaaataaaacctgattagttaagtccctaacctcttctaatttttgttggaacttaggtaaaatcgctttaaacttgctatttccgccaaataaactttttccttgaaaactaagttctagattaccattagctaaaactgtccgattaacagcattatctctttgaaaataaagttgcttttgtaattcattaattaactgaattaattccaaaattttaggatctattttctttagtaaaaggttcagctgcacatcatcattaaattgcgcttcaacactttcatctgagaaataaagcaaattacggagatgacttaaaactccccacaaagcttcaaaacgcaaagaatcattacgcgaacttacgacattgtctgtgaaacgatgagcttcatcaatgactaaatacggattctgaccccaaattgtatccatatagtggttagccaaataagcatgattagtcaccaatatatccgcttcttcttgtcgtttacgcgctaaattccaaaaatcgacccctgcaaaacggctacctactcttgcatcccctggatgttgaatctgtgcaaagagtggtgcattatagttagttaaatttaattcatctaaatcaccagttttagtcttagtcagccaaaccagtatctgcatctgtaatatcaaggtttgcttattcggtgtaccttgaaaaatcgtctgtacaaatccgtcaaggtcaaggtaacgactacttgacttaactacttctgcagtcaaatccaacttaatcaccttaaataactgcggaatttcatgttcaatcacttgttcttgcaacactttagttggtgtagctacaactaattttctaccagaataaagctgataagcataagcaaaaagataagaaaaagttttcccagtcccgttaggtgcttcaattagcatcgcccttttatctggatcattaataaactgatgcaaatgattaattaggtcgacttgagctctacgaaagtgtaaatgatctttaaatagcttttgtttctctgagtcagtctttgggaatttagcattcccaccatgtgcttcagaattatcattttgtttttgcagaataatattacgcacttgcatatattctttacctaaaggccgtttttcttgacgtaaattatctgcaatcgttgtaatcacccaagaggtatcccgaataagcccatgagataatgaactgagggtattcagtgtagcttgaggtagactttctaatttattaaaaatttcaagcaataaaactgcagtcccataagcatcagaatctgccttatgtggatctaaatgtttaatccccaattgtgttgtcaaatcactcaacttataagatggaaaagtcggaaaagcaatcttagccagttctacagtatcaattgctttatttgtaagtgcctcataaccatgttgcactagttcataattcaaaaaaggcaaatcaaagtcaacattatgagctacgaaaacagtattttgcaaaattttagtaattttgggtgcataataatcaaaatctctttgttttgctacatcttgatcatgaattccggttaaattaacaactgattgtggtatttcacgatgcggattgatcaaaaatgaataagttttaactaccttgagatttttaataatagcacacccaaactgaataatatgatgcccattctcacgttgcgttcctgtagtctctagatcaactacagcaaatgtatctttagtaaaactttttgccataatttcctccttcctctatttcacttcaaccgcttgtttagcatcaagcagaattaaatattttccaataacttttttttgactaaattcattgatagcttgttcatatagtctaagctgacctgtatatttttctttaatcaattcaattgattcagataaatgcgattgatcaacgtggtcagttttgtagtcaaacaaaataataccatcatttttgacaaaatagccatcaattgtaccatgaaccaaaattttggcattaggatctgaaaagtttttaaacaaagttttagcggagattaaactagaaaaatctatttctcgctttaaattctctggcttttgccaaaattcctcggcaaaattgctatgaacaaaccactcaatttggtctttctttaaactagaaacaatttctggattcagtttcttttgcttaatcaattcttgaatttctacttctagttgatcttcagcaccattgccttgataatcataatactgcaaaatcatgtgtgtagcagttccgatttctgcaccagtaaacttagtttgatacaagaaattaggtttagtatcaatcggttgtaaataacgattagtcgatgtcaataagtgggcattctctaattcggtctcgatcggatcgttgaatgctttttttatttcagataccgcttggtaagctgtagtttcactagcatctttaaacggataattaaattgataaagccgtttagtggtttgatttaaaaggttactttgcgttttatcattacttgtctccgctttctgataatcaggtagttcaccgttagcattttcataattaatatataaaaacgactgactcttatccaacgaattagtaatatcagacattttcacagctaggtgtcgatctaaagccaacgcaggtcccataaaactcaatggactagtggaagataacttatctgctaatgataattgaccaatctgatttagttcagtcgaccattctttaactcgtttatccagattaggaacatcgccaaccaaaattaatttctgcttagcccgcgttaatgctacataaagaattcgcgcttcttcttctaataattgcctttttttagttacatttcccatcgctttaactaaagagtcaatccgataatgttcttcacggagcgtaattcctatactatctgagctaatcacatagttaccttttaaatcacgcatttgatatttatgctgcatccccacataaaacacgatcggaaattctagtcccttagaaccatgaatagtcattaatctgaccgcattaccagcttctttagttaataaaggctgtgccaagtccttctgactttgccgcatccgattaataaaattgataaattggtataatcccttgaaccctgcactctcatatgaagcagcacgttcatataaagcttctagattaactcgtcgctgttcaccattaggtagtgcggtcattatctctaataaatttgtcctagcataaatgctccaaatcaattcagaaatacgatgtgccgtggcaaacttgcgcaaatcagctagttgatttaaaaaatctttgattcgagtacttaattcatctcctacacctacataagaagtcaatgcactatagaaagtagagttcttactcttgatacgaattttagctaaatccttttcaccaaaattaaacaaaggcgaacgtaaaactgaaactaatggaatatcctgatcgggattatcaatgatctttaagtagttcatcataacagtcaattcaaaagtttgaaaataattcttcgcatcagttacaaataatggtatatcctgcttagcaaattcctgcattatttccaaattatcactacgacttctagtcaagatagcaatatcactgtaacgtaactctctcattcctgttttactatcaaagatttgtacacgctcttcttttagttgcttaatacgtgctaaaaccatttgaatttcagaaaaatctatctcattttcatcttcattactgctatttttcttttcatgaacaattacttcactagctttaggagtgttttcaggataatacttagcaccaaaaattaattgtccttctttttgatagtcaatcccgccaaaatctgaacttagcacacttttaaatacttgatttacaattttggtaaccggctcagtagagcggaaattatctgacaacagaattcttttggtttgtttattatcatcattggcaaaatcatggtattttttcaaaaataagcttggctctgcttgtctaaagccatagatcgactgctttacatcaccaaccatgaaaagcgtatttttatctttatttttgatttgctggatgatattttcttgcaaagcattaatatcctgatattcatcaatcaaaatctctttgaatttattttgataaaattcacgagccatttgagaattcgatgtatcttgactcaaaatctgataagccaattgttccatatcactatagtcaagcaaattttcactgcgcttcagcttattaaaccgatcaatcaaggctagctcggatttagcaattgcagcaacaatcttttggccgcgctgcatgactttaatttgttcttgttcatcaacagcaaaaaatgaagtaaaagtatcaaaaaccaaattttttgcttcatcttttaacttttgtaggtcttcataaaaatttagaacatcttcatcccatttacttgacttacgataattcgctgtaaaaacacacgaacgtaatagttttcgttgtttatcgtagtctgcatcattttctaaagcaaaaacaaaatgatctaaattttgtgcaaacaaggtaaaagcttccttagccttagctagctcttttgtttctattactggattttctaaataatcattaattttcccttgtaagtcgccaatactagtaagcaagtatggcttaatctgtttttgccacaaatcagattccacgatactgccattaaccacgtaaacatcaaccaatttttttaaccatgagcgatactcaggtttggccatggcaaaatcatacaaatccagcaacaagtcgcgcggactatccgcatctctatcccctgcaaagttatcataaaaatgcctaaaatttacgtctttcttttctagaaactccccttcaatttcacgtaatgcacgttcttttaacaatgcagcttgagtatcatcagttagaatactaaaacttggatctaagtttacagagtaataaaagcgatggattacttctagacaaaatgcatcaattgtagaaatattagcagtatccacttgatttagctgctcacgtaaatatctgcgattagatcccggctttgctaattcagctgataatgcctgtttaattctagttttcatttcttcagctgctgctttggtaaatgtaattactaataattcatcaacttgggttcccgaaagaatctcccttaaaacgcgctcaacaagaacagttgtcttaccactacccgcagaagcagaaaccagaatatcatgaccacgatcatcaattgcttgttgttgctctttagtaaattgagacaattttattgttcctttcctaatttctctttgattttaagaattaattcttttttattcagattgtttatttcatgatattgattttgacgcagcatcgcatcaaaaaagaagacatcacgataatcagaataagttaaggcattcttcgctttgccataacgatatggattaagttcaatttttccagataaaatttggcttgatgcttgtcgaataagatactcatcgtattctagcagtaattcaatttcttcctcactaaagttgcggtcacgtggcaagctaaagccacctctagccttagttttaaccccagtatacagttcagaagaatagctaggatgatcatcaagtaatggctcagcttctactaagatttctggatcattgctgattaagccagtatacatcagcttgggcttactatcagttgctccctttttcaaatttaaactactatcaattagtttattgctattcaaacgttctaattgtctagtaacagtttgataaaaagcacccaataatgaaagacgatcttttccagcaaaaaattgatcatttttagtcaaaacatccaaataagaaaccatctgtaaagcaattccgttataaaacatcccaagatcaaattttttagctgatgacttgtaatcaataacctgggctaaaacttgatccttatcattgaaattggccaaatcaacccggtccattttaccgcgcaaatcaactttatgttgacctgatatatctggcacttttaagcttaatcctttgattttttcacctaacccaaaacttaattcagaatacttagcccgtaacggggtttccttcaaggagcgccgccaattatgagctaccttagaagtagtatggtctagacacttgaaaagatattgattaaaaggatcattcattaattgagaatattttccttcatccttcatcacatttcgcaccgaattaagcatttgttccagttctatgctgcttaaatctgctaagtcggtatgctgcttgtttagttttttcactaaacggtcaaaagtctcgtgaaaatagtttccagcctgaataacatcaaattcattttcaaaccgtcgccgcagcttaagcccataattcaagaaatattcatatgaattttcataaaaagtttccagttgtgacacagatgaattcaagttttgaccatacaattgactagccaagtcctgaccaatattttctggctggttatcaaaatcacttgcttcaagcactgtcttcgttttttgaggtagttgctcctgtgtgatttttaataactcttgcacagcaagacctgaatttattgaattcatataggttaaatagcctaaacttgcatcagggttagtaatgaaagacaaaagatcctgcatcttttctggcaaatcatgttgaacaaattgctgagcaccataatcctttaaacgttgataataaattgaaggatcaagctcttcatttgaagcattaagtactggataagatacatataccctatcttgtgctaaagctagcgacaaaccaaactgataattttggtctaagttattaagctgttgactatcttctaagtaagattctgaattaaaactattttgtagctgattcaagttttcagtagttaaaaaacctggcattttctgaatttggggtaaattattagcagtagcgccaatgataaacacttgcttatagccgctagtttgtaccatccccatttcagaaaggtttaccgcatcaagtgttgaaggaatttgggaaaaatttgcttctcggaaagcgctaattaacatattaaagaattcatttaaatcaaaagtttcaggattaattgctaaatagtcttgcaacagctgcattaataaatcccataattgctctggttgctgcgcctgctgtaaatcaccggcttcattggcctcatcacgccatttttctaatcggtcggcaattccgttcttagttaagaactcaaaaaatatcgttaacgccttttgactatctttttcttgctctattattttgaaaaatgttgaaatcttatcaaccaagtagctgcgcaaacgatcgatcttagctacttcatcatccattttgtctaagcggatcacttcagcattcacaaaattatcaaagtgttttttccataaattatgattaataccatgagccagaacaaaattctctagttcatcaacatcatgaatatactccgcctcttccttataccaagaaggtattaacaagtgtgtctttaggatggctagcatattttgtgtttgaaacggattctcatgtaagttaaataagctttcaattaaaacaaccagaggatgatacttcatttcctgttgtaaatcattaaaaaatggaatctgattttgacgtaaaattggcgtcaaataagtctcgtattcctttaaatttggagctaaaatcaaaaaatcatgatagcgatagttgcttagtgctacctgttgataaatagtccgcgctacaaaataagcctctgcatatcgagagtctgctttaactaattgtacctgcttcaattcgtcaactttaggaattgtctccgtccaaagactatttaatatttcacgaccatttgattgcgaattaagcggaaaagttgctgtcacgtagtccatctttctctcttgtaagaacagcgttaagcgcttaatagtttgctggattacataatcataatctccttcttccgcactagaattaatttcacctaagcgcgttttaaatgcaaggattacatcttttgctttacgcatcaaaattttaatcgttagtgtttcctgtaatgaaaaatgtgaaaaatcacagaaataaaaactggcttgctttaaatttttacttttagctaaaatttcatttagttgcagctgaacctcattcttagtagagaatttacccgcaatttctttaataaaggcatcatagataatccgcaaatcatgtaatttatttttagtttcttgatctaaattatcctctgatatctcgtctaaatctaaatttccgtcatagacttgcaaaattgtctgataaagctgatttactaatccagaattaacattaacattttcaaaaatagtcaattcatcttttttgttctcaataatatgagctaagagcattgcactagctgcatcatctagttgattaggcaatccttgctcggcatcttttaagaaaaaccaagctaaacgcgaaaaagacaaaacatgcaaatttttaactgcagtctcagtttgttgtttgcttgttgctaatttgttaattgccctaacttctgtggtaaacttaatatgattaggaacgatgataaaagtttcttgttctgggtgttgctgatagttttcaactgcttcttccagaattttttcttgtaatgggtcggtttgtcgtcctgtaagaattttgatcatttgttcgcactccttgctttttattttatcatagcaagggcaatcttttgtataaatctagtttaaggatgattaaaaatgaaaagcagctatttagctcatggcaaggtaattattattggggagcattcagtagtttatggatatgatgctttagctatgccaattaaggctttacacattaaaactactgttgaatctgcttctcaaatgtggatggataccgctcgctaccacggtccattatttgaagcaccggcagaatatgatggcctaaaatacgtagttaaacatatgcaaaaaaaggctggcaataaccatccacttaaaattacatacactggtgaaattccaatggaacatggttttggttcaagtgctactgttgcattaggtaccactagggcaatgaaccaattctttcagctgaatatgactgaaaaagaaattatgactgtaactaatcatgctgaaatgatcaatcatggtaaagcttctggtcttgatgcagccactgttaattcagattatctagttttttttaataaaaaaatggggcctaaaatattacaaaccaaattaggagctaccctgttaatcatggatactggtcaactaggcaatacaaaggaagctgtttttttagttaaaaaaatgcttgaaaagtccgactatgccaagaaaaaaatagctcgcttgggtgaattagcggatcttactaaaaaagcttggatcaagcacgatcgtcaagcagttggacagatttttaatgaagcacaagaaattttgcactcatttgatctttcaacaaataaaattgaccaactgcaaaaaattgccttgtcaaataacgctttaggctttaaattatcaggcggaggtcttggcggcattactatttccttgtgcgataacgaaactgtcgcccaagaaattgcctctaaatgtaaagatttaattagtgactactggattgaggagatttaatgaatagaaccgcacgagcacatacaaacattgctttaatcaagtactggggcaaagctgacgacaaattacgtcttcctttaatgtctagtttatcaatgactttagatgctttttatactgatactagcgttgaaaaaacagatggtgaaaatcaatttttcttaaataatcaacagcaaactgctgcagctagtcaacgtgtttttgcttatctaaaaaaattgcaggctcgttttcacgtcactggcaatttaatcgttaaatctgtcaatcacgtccctacttctgcaggattagcatcatctagttctgcttttgcggcactagctgctgctttttgtcaatgctatgacatcaacattgatctagaagatttatctcgtttagccaggattggatctggttctgccagccgctccgtttatggcggttttgctgtttggcaaaaaggtaatagcgacgaaacatcttacgcatatgcactagatgaaacaccaacgatggatcttcaccttttagcagttgaattaaataccaaacaaaaaaagatttcttcgacttatggtatgaaagatgcccaatcttctccatttttcaggccctggcttgaacgcaacaattcagaattaaatgaaatgatcaaagctataaaaagtaatgatttcactgccctaggccagttagctgagttaaatgcaaatgaaatgcatgcaattaatttaactgcacagcctgaattcacttactttgagccgcaaaccattcaagctattaaattagttgaacaacttcgtactgaaggaattgaatgttactatacaattgatgcaggaccaaatattaaggtactttgccaattaagaaatagcaaagatatcattcaacgcttttcgtccgaatttaataatgttaatatagtgaatgcaagttttggtcctggaattacttatttggactagttgtaattaaaaaagttaattagattcgaggatttagttcttttgataacagaaaaagcgcccggaaagttatatattgccggagaatatgcagtattagagcaagattgtcctgctattttagtagcagttaaccaatttgtacgtgtgtcaatcactaagagtaaaggggcaactggcttaattcactccaagcaatactcacaggattcgattcattgggttcgtcagggctcaaaaatggtaatcgataatcgtgacaacccttttgaatatattttgtcagctatttcatttactgaacaatattgtattgagcaaaatatcaagatgaaagtctatgatttacacgtcaattcagacttagattctgcagatggtaaaaaatatggtttaggttcaagtgcagccgtcacagtagctacagttaaagctatcttgcgtttttatggcgtaaaaatgagcaatgaactggtttataaattatcggctatttcacactattcagttcaaggaaatggctcagctggtgacattgcagctagtgtctatggcggctggttagcttaccaaacttttgacaaaaaatggttaaagcaagaattagctaataagactttagttcaagtcgttaatgaagcttggcctggcttaaaagttgaattactaactcctcctaaagatatgaaactgatgattggttggagtcaaaagccagcatcaacttcacgcctcgttgatgaaactaacgctaataaggcggctttgaatatggaatataaaaatttcttagcagcttctagagcttgtgttttaaagatggttcaaggtttcgaagcaaacaatattgctttaatcaaacaacaaattcgggctaaccgtaaattgttgcagcactttgccaaaattaaccaaattgccattgaaattccacgtttatcgcaattaatcaaaattgcagaaaattttggtggagctgctaaaacttctggtgctggtaatggtgactgtggcattgtgattacagatgctaataccgatgttgaagcacttgaaagcgaatggcgccataatggaattatgcctcttaattttaaggttcaccagattatcatggctcattgatggagagttctatgtcgattagatctgaaagaaaagaagaacatctgaagttagctcagatgttttttaataaagaaaaatataatagttttgatcaactgcatttgttgcgccctgctctgcctgaaacaaaagtcgatccaactattctgggatcagaaatgtttggcaaaaatgtttctgcgcctttttttatcaatgctatgactggtggctcagctgcttctaaacaaattaatcaagcattgggacaggttgcccagcagcaaaatattgccctagctttgggatctgccagcattttagctaaggaaactgatcaactagacagttttatggttgccagagcagaagatccagatggtgtactaattgttaatgttaatccagaaacaccaatctctgcaattaaacaaattatccaagaattaaatgcagatgcgcttcagatccatttaaatacaatacaagaaattgccatgcctgaaggtgatcgtgactttcgttggcttgattcaattaaagcaattcgtaccgctatcgatttgcccattattattaaagaagtcggttttggattggatcaaacaagtattcatcttttaaaagtaaatggcattgaatacttcgatgtcgccggttcgggtggcacaaactttgcccagattgagaatgcacgtaatgccagtgacgtttcatacttagaagatttaggtttacctactgtggtgactgctctgatggcatggcaagagcaagttaaattttatgtttctggtggagtacgtaatcccctagatattttaaaaggtttagctctaggaggaaaatttgttggtatttcaaatgtttttttacaagaatacatccaaaatggtagtactggattagagcaattaattactaattggaaaaatgaattggctgctttaattgctgtttacggcaaaaaagatttagcatccctggtacaaataaaaaaatactataatttaccattaaaggctcaaatcgatcagttactgtaaagtaaaagcactagttaatgattactagtgcttttactttacataattttccttatttaatttcaagcaatttagcaatttctttttgaacagcactttcattacttgaaccaataatttgccctgcagcttgtttggcttctggcaacgccgttgcagtagcaaaactacggcctacatatttcagcattcctacatcattaccgctatcgccaaaagctatcatctcacttgatttgatccctaatttttgactcaaatatgctagacctactgccttattcattcccttagtttgcatatcaatcgagtctgctgcaccagaaacaaaaccaacctccggatatttttcttttaattcgcgcaaaattttagacattttatcttctggcactgtcagactgaccttgaaaatctgatcatcaatttctccaaaagaatctactacagtaatatgctccatgtattttttcatttcttgtttataagctcgtccactgctctttttaacataagcacttactagccccatcactacagctggatatggatattcagtagttatttttaataaagtttgatatatgtcatcacttaacgagtcaacatgcaaaatttgtcttccttgagcaactaatgccccattttcagctacaaaataaattttatccaaaacctcaggaaaacgagtcattaagttagcatattgattgccactagcaactacaaatttaatcccctgcttttgcatttccgcaaattcacgcaaaaataattctttatcatagtctttctggtcagttaaccaggttccgtccatatctgtcgcaattagttttatcattttctcaatccctttgggtaaaagttcttcaatacttgattaccagcgattttgccaaaactaaatattaatttttgatagctgactaacacaaagccccgcaaatcactgtccactttaacggtttcaccgtgcaaataattttggtattcttcaattgtcggtaaatcataaacccgttcttgctttaccttacctagcacttctgccaattgatgtcctggttcaaaacgttttttctttaatatacccaactcgactccattattaattacatgaagcttacttttttcaggcaaactgattgcaggaatatagacatgttcattacggacttttgctttattacgccagtcacttaaagcaactggtaaattaaactgatccattacctgaccaactagttcctgatcatttttggttaagcgccacggatcacgcttggcttttttgtttttgctctttttttcaattctagctttacctactttttgtaaaactgccacaaattgtccttcacctataccatcttgaggccaaaagcgtaatgttttagtcaaatcaggattcccatcagcccactcaggctgtccaacatcaatcttattagtttgtatccctgtatctaaaattgtaaaaccatattctttatttaaccagctaacaatctgctcatcctcttctggtgcaaaggtacaagttgaataaattaagcgtccgccaggttgaagcatcttaacagcttcattgaggatctctttttgacggttctggcatgttaaaacatagtcttgagaccaataatcaattgcctccggattttttctaaacattccttcaccactacatggagcatcgactaaaatcacatcaaaaaattccgaaaaaattggaactaacttttctggactttcattagtaattaaggcattactgatgccccaacgttcaatattttcccgtagtgcctttactcgtgttgcagagatttcattagctactaaaaggccctcacccttcaattgttctcctaatgctgttatttttcctccaggcgcagcacacagatctagcacgcgctctcctggccgaacaccactaattgccgcaggaaacatagccgctggatcttgagaataaacactaccgcttacccactcaggatcttcccccgatacttcaccataataggctgaatttatttgcggtactgaatcagtaagctcatatgaaaccttagtaggcttcaatgtattaattctaaaagcttttttgctctcttcattcatcgccgcaaatagttcttgtgcttttttggtacctaataatttttcatatttagttttaaattcatttggtagatttagcaattttcctgtcctttctcactaagtaatagaccatcccacaaaacgccaatacaattacaacccaggaagctattaatgtaactattaaagaaccatatgttgaataaaaggcatgccatcttaaaaagaagtatgtagcaagggcaaaaatagcctctattaaaaataaacgtacgctgcggttaattacccaattgcgcagcaaatcatcgtgtagacgtgttaaacgagcctgacgcttaattcctattgcaagcaacatatttgtgatcattccgaccaataggcaaacaactaacattaaaatatccggcacgacagataaacgatctcgatgatgctcttgaacaaaagacggaatatgcaaactagcatgataatgcttagcaatcttttcaatcactgcaggtgttgcatctactacaattcgataattcttgagctggtctttagcagttggctgatcaattcctgtacttagataatatttatccatttctacctgtggatagtccttaaattcgcctataacagaataataatttttgcctaaaataacatatttattattctgcacatctaataaattaagtttaactgttggccccagcaccacaaaagaaacctgtcctttaaaatcatcaggcgaaaaatagcgaccactctcagttggcaagccagtaacggcatgattagcccaaacaagcacttgttttttttcataattattatctagatgcagttgaatttgatgattcgcataatttttgtccaaatattttaggaaagtactaatcttatcatcactatctgttctaaaatagcgggtattattagttaagccgtgtgcttccagcaattcgtcagcataattagattcaatattggagagcattgttccaattcctaaaaaagataataaaagaatcagtaacaaaaatatctttttaaaattcattttttatttcaaatacctgttcattaataaaatcgaagctttgcaaggaatgattaatctcgtctaaagctgcactatttttaaaccaattttggtgccaaaattctggtgaattagtagcaccatctttttcaccaacaaagagcaaatgacaacttggattatacttatgccaagctgccacagtttctaaatctccgtgaccgaaatttggtgaccacgaacatagaactagattaactgtgtgatacttcttaattgcttggtcagctggtaaatcttctactggataaaaaggcttagctccagtggtcgacgtcttggcccactctaatgagtctgtactgtgaactttaattccaacctgagtcaaagcttgagaccaatacgcgttgcctgccatgatttctaacgctgtttgtacatgcagcttatttttaattaactgcgcagtctgaatattaggcagagaccagatgccatatattaaagagagatattgccgaaaattattaagtaaattatttaaatcccttaaggccccttctttatctggtcccacctcaactaaaacttcttcaaattcatctggcaataaacctaatctgcgtggtgcccgcttcaatggcttacctgcttgtacataactatcaattaatgctatttcttcaacttgtcgtttaaccgcagtatgatttatctcttgctctaattttgttaatttcgtcaaaaattttgtcatacttaaacaccttaatatgattttaccattcaacggcggagaattcagttataataagactagcaagcaaaggagatattctatggttgaaaccaaaaagagaaatgatgatgaaagcattggccgctttgttttagacataattattatgtttgcaattttgatgggaatttactactttatttttagttttttcctatcaaatgaaacagtatctggtccatcaatgcagcccacatttgagaatggcgatcgtttgattgctgtacgtcattttacgcctaaacgaaatgatatcgtcattctaaaagcaccagaccaaaaaggtgctctgtatatcaagcgaattattggtacacctggtgatatggttacttctaaaaatgataagctttacattaacggcaaacaaattgcagaaccatatttaaataatggctaccaaagaaagtcacataaattaggtgaactctatactaacaatttcactttaaaaaagcgagtacctaaggatagttacttcgtcatgggagatcaccgcgatgtttccaaagattcacgttacttcggttttgttaagcgcagcgcattagttggccgagtcgtcttcaggtattggccatttacgcaatggaaaacattttaatcaatgaaattgcaaaaaattttattttttattccaatttgattaaaattagagggtaaggagaaattattatgaatgagcaagaagaattatctgatgcaattatcaattttcaagtaaaacaccatgttaatgacactgacctagcctttgctagtcacctctcagttgaaaaagttcacgccatgaaagttggcgatggacaattcacagccgaagaagtaaatcagctttatgattacatgtcagcaaatgcttagttaactacaaaaaagagcttcatttcttgattgacaatgtcattaagttaagacattgacaattaatattagacttttaaagcactgatttaacatttaattggttaaattggtgcttttttcgtacaacaaataaggcatagcacagattctgcttttttaagctacgcgatataaataatatacagctgatttgggcttaatatttctcttgtccttgcggcctggtctaattggaatggtataatagctgatctgaataaggatccgttcaaaatcttgcgttaaagaagaagccaaatacatgctctgaataatcaagcatgattgcttgaaattgatggcatattgatacttgcaatgcttttgcggaatataggcctgtgcatcaatttgactgattgcattaaacataatcatatgggcataaatttccatttcaataaatttatcttgtttggaatggaactgtacactgcctaaagaatacttcaatttcttgaaggaggtctcaataccccaacgcagatgataaagctctttaattctttttagcggataattttttcgatcaagattggttagcacaacttcccattcttctttgcctgatttggcatcattaattctaaatttgcaggctcgaaattttattgtgcataactcgccaaaatcccagcttagatcctgggtatttttagagcgatacttaatatattggcgataatgatgctggacatggtgaatattctcactggctttatgcgtgatgtagtaatagttagaagtagttaccaggcaggaaatctcacgatcacattcttgatcaggcaatgtcgttatttctttaactccgccttgtccagccttagttcgtattatgtaatgacagttaggcaggcgattgcagttttcaatcatattgaaactagtgtagccacgatccattgttacaatatatggaccacaattcaaagctttaagcatttgaacagccgctttgcgttcatccatttctgatttaggctgaaaaatacaatcctggtaggtattattcaatagatcatataaggcattaacgtgaatttgacaatagggtttctttttatgagaagaagcttgtacaatgttattcgatttcggattccagatttgattaaagtcagagccatcaatggcaaacaaacggtagtgatgatcaaaaagttgaatattaaatagattttgattaaaaacagtcagaatatgtttaaaacaagcaggagaaagctggcttttgcgttgaacataggcagaagtactaactactttatcgttctttttagttgcatcttcgccaaaagctctaaagagttcactgtttaaattctgaccttgcatgttaattgtagttttaaggactgtcgctgcatctaaagtgcgtttcctggtaaaagcatgaggattattaataaaatcgtgaatatgatccccagtattattgataatttgatcaagacgttctagaatattcttatgaagggctttcataattaacaccatctttctggcaataattttgaaggtttaaaatatataatatataagataggcgaaaaggctggtcttttcgcctttattttatacaaaaaaagagatcgaatccaaatgattcgatctctaaaaaagcacccttaattgtcaatgtcttaacttaatgacattgtcttgattgaaatgaagctctttttttgcattaattaatctatttttggttcaagatatttcttcacgaatactagattcaaaataccgaaaacaaggctaacaataaacaagcataaatcatctaaccagattggatcggttgcttgtaaatttggactcttatcaacaaagccctgtaacttagacataaagatcatgccgcagtaagctgcgacaattaccaaaattgcgataattaacaagcgagcccaaactgtactcttaaacggcaagaaatcagtaattactcgcgaactaaaattggcaaagctgacaaagaagtaaatgattaaaattatcaaaatgataaacaaccaatgaaaagcaagcattcgattgctagttatttcaacgccgggaactgttttaattggatacagaccaaactcacgaaatgcttgagcaaaactgtctgccccgcaactagggatcagcaacagactattaacgatttcttgcagcaagaagaaataaccacatgccagcaaactgctaaatatattagctaagtatgtttttcgttcatcgctagctgctaaatgccaggtttgactcagattaattttttcattttgccaacatgtaatcgcacaaaaggcaaaatcaatgtataaagtcacatagacaaaattattgcgccagaattgccctaaatttttagacggcagatttgctagaccattccaatttttgaaaagaagaaaataacctgataaaaatactacagcaaagatattaattaagaaaaccaaataaataaattttcttttttgcgtccacatttgcctaaacaaggtccaaaaattcgtcactatctacccctccccttcaattaacgattaattatcttaggttcgacaaatttactcattaagtagctgtcgattgctcctaaaacaattgctcctgcaaagtactcaaccactgaaatacccaatggatcatatgctgcttctttggcaaaacgatgcaaatacatagcagtaatttgttcgtttagctgttcagcaatcaagattgcaataatcacaatcactgccatcacaaataacttaatgacaatattattgttaactggcaattgatcaacaattactttcgtcaaaaaattagcaaaactgacaaaagtcataataactaaaaccgttccagttaagaacaatagaaattcaattaataaactagcatctgcccaagtaactttagcatcaactaagtcatgaagcagtgaataatgatgacttaaattatcaatcatagcagcaacgaagcctaaaatgacttgaattacaaaaatataaatacattcaactaaactagaaagcatattaatcagccagattttgacacttgaagctggagctagctgccaagtttgactgaggttgattttttcattttgccagcaaagcagaccaacaaaaatcacatcggcaatcggcgtttcgagcattcctgcactaagcaaacgatctagccaattactgtccttactaatgttgagataagctaaattgcttttatctaacagagccattaccagcaaaaaaaggactgcaaaaacttgtaataacaaaactaagttagcgtagcgccttttttgcacaaacatttgcttaaacaaggtcttaaaatttgccataaaaaactcctaattctgttttgcttctacgaatttattcaaaagcaagatatcgatcaaagtaatcacaacatcaaagaccaagaattgaagaatcgtagtggcatagttaatatcctggctgttgaccataaaaggactaaactttcctaagactgaaaagataattgttgccgcatggcctaaaatccaaataatcgcaataattacaattactctaataataaaggtccatactttacttgagccacctggcaaaaaatcaataatgctgcggcttgctaggttaagcaaacttacaattgcgtaccaagcatagccaataaaaatgattagcagcaaacttccgagcattgtttgccagtctcttgctgaaagatggatgctagcctgacctattgctttgcgcacatcttgatcagacaacatcggcaaaagggtaacgattatcgtgaccgcttctaaaattcctaaccaaatataagttaaaaatgctgtcccaaaattgctaagcaaaaacttagtatcagttaccggaatcaagcgccaagtttgactgcgattaattttttcattcttgattgaagaaataatccaataaacaaaatcagcgataaatgacgttatcagcatcattactgcaaatacagcgagaaaagcaacaatcacattgacagaactagtatcttttccattaacaaattctggtgtaccattttccgaaacaaaaccaataattgtaaaacataaactagcaaaggcttgaattaagaagattaaatagactgacttgcttttttcttgaaacattcgattaaacaatgtgttaaaactagtcattattcatcatcctcatctgcataaaaactttcatagtattcttcgattgacttatgcgtttgacgaatgtcatctgctgacttgtgttccaaaacggtatgatcttttacaataaccacttcatcaagcaatgatgaaatttcattgacaaagtgatctgagattaaaatcgttgccttttcatctttccacaaaatgatggaattaataattttctttcgagccattgcatcaatcccaccaaaaggttcatcaagtaaatacaaatctgctttacgagcaaatgttaaagcaataatcaatttttcacgcattcctcgtgataactgactcaacttcatttcaggatctaatttcataaacttacgcagctcatcgaattcattctcatcaaaatcttgaaaaatcgttgcgtaaaatttaaccacttccttgatctttgttgaatcgctgaagccagttaaaccatcagtaaaagacaacttagcctttctttctgcctcttttgttgccccctctaaattaatttcgcctttgtaattcttagctacaccggcaataattcgcatcaaagtggtcttaccagcaccattttcaccaagtaacgcaacaatcttgccaggagctaaattcaagttcacatcttgcaatacttgcttctgatttttcttataacttacatctttaatagctaataaatcattcattctgatccccaccattttttaaataattctctaaagttgaaactaactcgttctttcctattccaaactcttccatattttgaacaaactgttctaattcattattaattaatgactgcttggtttcggataatagtttagtatcttcagtaacaaaattaccttcgccacgtttagtataaagaataccttgactgttcatctgttgtagtgctctttgcacggtattaacattaacggttaattctagagcaagttttctaacagaaggaatcttctcaccagctgttaacttgcctaaagcaatttgacgatacaagtattgttcaatctgaagataaataggaatattatctttaaattccatttactcagctcctattttgtactgtattattaatctattacactaactataatacttactttagtcactttttgcaagggctaagtttaatcactttgtttcacaagttcataaaagttaaaagtacaacaaaaagatagtctataatcctataatgacggtaattataaactatcttttatttttaatagtattagtgcataatttttatttattaactatgtttaccctatttcctaatctatcaataatctcatattagatcagaaatagaattattgatatttttagtcaaaaatgtttcacttacttagctctttcagcatttaattcagccattttgatcatcacgtcaacagctttccacatagactcaagaactgtgtattcataacgaccatgcatgttttcttctccggcaaaaatattaggacatggtaagcccatataagtcaattgtgagccatctgtaccaccacgaaccgggtcttcattgacttcaagaccttctgctttataagcatcgcgcgctaagtcaacgatgtccatatgtttctttaattcatcggccatgttgtaatattggtcccacattttaagtgtaattcgttcagtaccgaattcatcattcattttcttaacgattgacttaaccaaattcttccgctcttcaagcccatcacgttcaaaatcacgaataatgtaatctaagtgagcattatcaacagtaccagcaaaattcattagatggaagaaaccttcgcgtccatcggtatgttctgggcgatcgtgttctggcagttgattatgaaagtcaattccaacttgaattgcattaatcatttgccccttagcaacagctgggtgaacattaactccctgaatatcaagactaaattgtgccgcagagaatgtaccccaatctaacttaccaggagcttcaccatcaacagtaaaagcaaagtcagcaccaaagtcttcaacatcaaagtgttcagcaccagtaccaatttcttcatcgggagtaaaggccaatcgaatcttaccatgcttaatttctggatgattcattaaatattccgcaaaagtcattaattctgacacaccacacttgtcatccccaccaagtaaggtatcacctgaggccgtaataattgtttgtcctttataattcttcaaatgtggaaaaactttaggatcaagataaaactctgaatctcctaattgaattttgctttcgccatcataattttcatgaatctgtggtttaacattttctgaattaaagtctgccgtatcactatgagctaaaaagcccattactggaacatcataatcaacatttgacggaatttcagcgattacactaccagcattttgattgtagtgaatgtcacttaaacctaattcttccaaatctttcataataacattcttttggaagttttcttctctttcagttgatggaaagcgatctgaatgttcgtcagaacgcgaattaactttaacgtactttaaaaatctaggtaacaaattaggatattccatatataactctctttctaattaaaataagtcttgaaatggattagtagaaacctcggaaagctcaattccaacattccagttattttcttcattccactttttaagtcgaccatagaccttgtacttaaatagtttttcagtataatgaccaggatcaacaacagttaaaccagatgaaatcatatcatggcctacatgataataaacatccccagtaataaaagcatctaaatggtcatctaaggctctagtccaatatttaccaccatccccacaaataaatcctacactggtaattggcttttcattgtttgcagtaatcagacgtgccattttaatttgcattttttctttaacataataggcaaaatcataagcagtcattgttctaggtaactttccttttctacccatagcaattccatcatcatccagacaaaatggttcaacatcttgcagacctagttcctctgcttgccaatcagcagatccatcttgggctttatctgaattagtatgaattgaataaacagtaattccattcttgataatattgccatacattgcgttttgtgcattcgcaaaatccaaattttgtgctggtctaaacattacaggatggtgactaacgatgaaatcaacccctttttcaacagcttcttcaactacctggggacgtacatctaaagtagtcattactttggtaacatcagcctccattgatccaatttgcataccaacaggatcaccttgtgaagcaatgttttccggaaaatcttgtcgcaaacgcgcaacaatgtcttttactttggtcatttctccaattcctccttgattaatttaatatcatgatctacttcattgattcgatcttcgtctttttttcttgctttattcaaattaaccaggaatctttgataataagcgagttggccttcccatttctgataaaaaactggattcttttcttgtacaataaaggggccaaaaaagatttccttttcagtcatctcatgcttttcttcagttaagctagccttaattaattcataagtatgcccagcctctgcaattaatttttctgagataatcttataattatgcatcatcagccaattacgtacccctgcttcgcctatattaggttctagtaccagagttttaaattgtgcatctttgctccaagctctatcaagaatatcagtcattaacttgccgcccattccggcaatcacaactgtatcaatctgatcagcatgagtaacggtttctaacccactacctaagcgagtttcaatttgctcggttaacccagctgctgcaatatcatttttagcattttcaagagggccctctgcaacgtcactagcaattgcataatcaattttgccattttttactaattcaattggcaagtatgcatgatcagttccaatatcagccactcgactgccaggatctaccatctttgccaacgtatttaatcttaaattcatgtttcctccataaaagatatggttaaccaaattttagcatatttcatagtcttattttgctactatttgatataatcgtcacagaaagcgggttttttacatgagtagaacagaaaatgtcacattaactaatatgtgcatggttaaaaacaaagatcaggttttagttcttgatcgcaacgatccggtctggccaggacttacttttcctggtggtcatgttgaagcgcatgaatcttttcatgattctgtcgtcagggaagtcaaagaagaaactggattaacgattagtcatcctcaattagttggtgttaaacaattttatgatcacaatgatgaacgttatttagtatttttctacatagctgaacaattttcgggtaccgttaaagaatcagacgaaggtaaactaacctggatgagtgctaaagaattgaaaaagcaaaagttagcttacaattttgatcatgatttaccagtattttttgaacaaacaattagtgaacatatgcttgacggaaagcgagatgagctattttaatgaaaaaaactgaaagtaagtttgcacttttagctgctttaattgctattttagcttttgcctctattcccttatggcaaaacaatctgaatagtttacgaccacaaactcacacggttaagaaaaagaagactgctaaaaagaaaaaagtcgttcatcttacttggggttacccttttaagaagctctatgaaaagaaaatcaaatttaaatctggacaaaagtttggtgaaactgacgtcattcgtcgagtctatcctagcaagagttattttcatgatggctatgacttcggatttagtgaagttggacattcttccgtatatgctgtgcatgcaggaactgtccatcgtgttaaatacgccccaggtttaggactttatatttggattatttccgatgatggctatgttgaagtttaccaggaaggcttcctcagtattactgatatttatgttaaaaaaggtcaaaaagtcaagttgggacaaaaaattggtaaactgaccggctctcacattcatttaggagttactaagacagataaagattacattgataaaaagcatgacaatacgccatgcaaatactattggaaagataatggcacttggttaaatccaatgaaaatcattgaagataatctaagggcagcaggtaaagatccagtccaataaaaaagagctaagtaaaacttagctcttttaatatagataattataattaatccatgaaatcacgtaattgatttgagcgacttggatgacgcaacttacgtaatgccttagcttcaatctgacgaatacgttctctggtaacaccaaataccttgcctacttcttccaaagtacgggtacgaccatcatcaagaccaaaacgcaaacgcaaaacattttcctcacgatcagttaaagtctcaagtacttgttcaagttgttccttcaacatttcgtaagaagcgtgttgttctggactagttgcatccttatcctcaataaagtcgcctaagtgtgaatcatcctcttcgccaataggtgtttctaatgaaacaggttcttgagcaatttttagaatatcacgtactttattggttggcatattcatttctgcaccaatttcttctggtgtaggttcacggcctaagtcctgtaacaattgacgttgtatcctgatcaatttattaattgtttcgaccatgtgaacaggaattctaattgtacgtgcttggtcagcgatcgcacgagtaattgcctgtctaatccaccaagttgcgtaggttgagaacttaaagcctagacgataatcaaacttatcaacagctttcattagtcccatattaccttcttgaatcaaatcaaggaatgacataccacgtcctacataacgcttagcaatagaaactaccaaacgaaggttggcttcggctaattcttgctttgcctcttcatccccggattcaattcttttggcaagagcaatttcttgatcagcagtaagaagtggtacacgaccaatttccttcaaatacatccgcactggatcgttcatgcgtacgcttgatggagcagacatatcctttaattcagccttttcaacatccttttgtttctttaaggctaactttgaaggatcaccgttttcatcaacaatgctaataccattatcttcaaactcttgtactagttgatctacagccttgccttgtaagttataaggcttaatcaaacgagcagtgaaatcttcttcagtgatcgacttatctttctttacgtcttttacgacttgcttaaccatcttatccaaagatagtttttgtgtagtttctttttctgccactaaaaagcctccttattaacctaagatccgttttaatccaataatctcctgagtgattgcaataattccttgtgcatcatttttgcgcttagcatcctgtaattgagcttgaagctcattcagcctggaatagatgttgcgtctttttaatgctagaaccaaagcatcaacttcttgaattgtagaatcttttggcatctgtgccatttcagcatctactattataccttgaagttgctcaggaataaaatctaagaacccatcaatttgtggattttcatgagtttccgcatattttaaccaatcctgtgccagagtttcaaaatcctgattaggaaaatgaaattgcccttctaacatatatttttgagcatcagttgaatgaataaataaatacaagagtctggtctgactaggatttttttcaactactgactgctctgtaggcacgtcttcatcaccaggtaaaggtacgtctatcggataatcaggtgaatttctttgagaattacgtacatgattgcgtgcccgattatttcgccgtctttctttagcaagatttgcctttaacgaagcaatagaaaccccactagacttcgccaatttttcagtatacatatcttgctcaactggattgcgcacttgtgcaatttcttttacggcctcacctaaataagcaatcttttcacggtcattatctaagttatatttttgttccaaccgttttaagaaaaagtcagtcggcgttaaggcacctttgacttcttccagatacttctcagcgccatattttttgacgtattcatcaggatctagtttttctggtaaaactacaattcctaaattaaaattgccatctttattaaacatacgtgcagcacgttcttcggcatggactcctggatcatctccatcataattaataatgatattaggagtaatacgtctcaacaaatatatttggtcatcagttaaactagttcccattgaggcaattcccgatttcacccctgctttatatgctgcaattacatccatataaccttcatatagaactaagtgaccttcaccacgagctgctttctttgcttctgcaaagtggaataatacctttgacttggtaaaaatccccgtttcaggactattcatatacttagcttcggtcttatcatcagaaattcgtctaccagaaaagcctatcgttctcccattttcattatccaatggaaacatcaaacggtcacgaaaacggtcgtataactgcccatccctagcttgaacaaataaaccactttgtgctagatcatcatcttgataacctttactacgtaaataagtaatcaaaacattatcagccttaggtgcatagcctatcttaaaatggtctaatatttcttgatctagttctcgcttttgagcatactgcatcccccgttcaccggctttagtagtcaaaagcacacgatgataaaaatcaacggcatcctgatgcatttgcataagtggatttaatttggtgccactattatgaccatatccattaggcatagcaatatgggcaaactcagctactcgctcgacgctttcgggaaaagttaaatcatccttatacatcaagaatttaaaaacatttccacccttaccacaaccaaagcacttaaaaaactgcttatcagcatttacagtaaacgacggagttttttcttgatgaaaagggcaaagaccaatatagtctttgccttttttctcaagcgaaacgtactgactgataacatcaacaatattgacgttactgcgaacctctgaaataaaatcttcaggaatccgtccagccatatgaatcaccctttttctatctaaattaactacttaataactaacttgcttaagtcacctaaacgatctgctaattcattaactgcatataattgtgctaatcggttattcttgaccttttcgtccttagccatgatcatattagtttcaaagtattgatcaatcactggttgcagttgaacaaaaccttggtagagatcagccaaactttcaatatcttgcaagttttgaacgccagcgtaaagttctttttcactgttatcatcaaagagactttcatcaacagcagtattactcttaaatttagccttctttaagatgttatcaattctagtcaaactctcaactactggcttgaattcttcatcatcatggtgaagttgcaatacagtagctgctgctaaaatttgacttggatcttgttgacttgaagcaagaacagcatcaataatatcatacttgaagtcattcttttgtaagtattgcttgacacgatcacgaatgaagtctgcaatttcctggtcagcatcactcttaggtagcttagctggagttacaccattaagcatactaatgatttctggtaaaacttcgttaaatggtaatgaccacttctcattaagtaagattcttacaataccatatgcataacgacgaagtgcgtatgggtcattagatgatgtaggaatcattcctgcaccaaagaaggttacaattgtatcaattttatcagcaattgataataatgaaccaaccgtagtttcaggaagtggaccttcagcagtggcaggcatgtagtgttccttgattgcaactgaaacttcttcgtcctcacctgcaagacgagcataatgcatgcccattacaccttgaagttctgcaaactcaccaaccatttgggtaactaagtcaaacttgtaaagttcactagcacggtcgaaatccttgactacattctctggtaaatcccaacgcttagctaagtaatcaccaatcatgcgaacacgttgcatcttttcagccattgaaccaatcttatcgtggaatgaaacattcttaagacgatcaacaaaatgactaagtggatacttgcggtcttcatcatagaagaattgagcatcgtccaaacgagcaactaaaactttttcattacctgaaataacattatcaaggtaatctttatttccgttacgaacagcaataaagtgattaattaacttaccagtttcatcatagacttcaaagtatctttgattgtctttcattgaagtaatcagcacttcatcaggaatcttcaaatacttttcatcaaatgaaccagcaaatacagtcggatattctactaaataagtaacttcttctagtaaatcacgatctggtttaacttgccagttgttcttcttaactaattcattcatttgacgaacgatcatatctttacgttcatctgcatcagcaattacaaattgatcttttaatgcatcttcatagtcatcagcattggccaaaacaactgaatcgcctaagaaacgatggccttgagttttacgacctgcagtaatatccaaaatcttaacgggaattacatcactgccaaataatgaaacaagccagtgaattggacgaacaaactcaaaatcatttgaatcccaacgcatcttagtagggaaagtcatcgccttaatgatatcgctcataccaagtaagatatcactagctttcttaccttccttttgaacgtgaacataagcgtattcagtacccttaagttcttcaaaatagatatcgtctgtagtcattccttggccacgagcaaatccttgagcagccttagtccaattaccatcttgatcttgagcaatcttcttagctggaccttttttaacttcatcaatatcgtcttgcttttcagccaaatcttcaaccaaaatagtcaaacgacgtggagttgaaaaagtcttaatatctttaaatttcaagccattttcttttaaaaattttcttgttctgtcagctaattgcttaacgctgcgtggtacaacgtgagctggcatttcttcagtaccaatttcaaataaataatctttagccattttctacccccgcctttttgtcttctgcacttttaagcaatgggaagccacgtttttcacgttcttcgacaaatttgacagcaacttcatgcgcaagatttctaattcttgataaataaccagcacgttcagtaactgaaacagcaccacgagcatcaagcaagttaaaagtatgtgaacacttcaaaatgtaatcatatgctgggtgaaccaagttcttatccaataaacgcttagcagttgcttcataaatatcaaagaattgaagcaattgttcttgatttgattcttcaaatgcatatttagaatgttcatattctggttgcttgaagatatcacgataaagaatgccattaccccattcaagatcaaatactgagttaacatcctgaatatatgacgcaaggcgttcaacaccgtaagtgatttcactcatagttggcttaacatctaattcaccaacaacttggaagtatgtgaattggctaacttccataccgtcaagccatacttcccaaccaacaccagcacaacccatagatgggttagcccagttatcttcaacgaaacgaatatcgtgttccaaaggatcgatacctaaaactttcaaactgtctaggtaatattgttgaatatccttaggagctggcttaataacaacttggaattggtggtgttggaataaccgattagggttttcaccataacgaccatctgcaggtcttctagaaggctctacataacaagctgcccatggttctggaccaactgcacgaagaaaagtgtaaggactcattgtacccgcacccttttcaacatcgtatgaaggcataatcatacaacctttggaggaccagaattgttccagcttaaagatcatattctgaatatttaatttcttatctgccatttcctttaatctcctcctgcgctaggccataaaaaaagcctatgcaaaattttgcatagggacgaaatattatcgcggttccaccctaattcaggaagtatccttcctgctcttaattgaacaatatgactagaggtgccttttcctagatgtcctcacaccgaccgacattcgctgaactagtacttttcttaaatcctcatcatcgtcaaatacgtttttattttaacacatgggtcatggtaaaaccagatttttactaactaaaaagttttaattcatctaaaaatttcttagtctttaaatttaggcctatcgtttcatggtaaatacgatcaatcgcttttctagtagccctcttcgtttcttcattaattttaatatcgcctaatcgctcaatcggtaataagccaattgttctaattacagcagtttcttttggctttaaatgcattcggctagtaactgtactaaaatgatcgctacaaataactccacccattttaatcgaataatcaaaaacgcctttttccttaccacaaataacacaatgctttagctgtggctcaacaccatatgctgctaatattttcatctgcacaatttgtgtaatcatttctgcatcaacgccactatctatttttttcaaagcaaataaagctaaatcataatatttaccaattggctgatattctacaaaggcgtgatcaattaaatcaaaaataaaagaaatataagcgttcttggttaaatcattatataagccatcaaactgccttgcccctttatatgtgcgtaaattacttaagcccttttcgctcgtataaattacgtaagtaccaatagaaaaatttaatgttgctgcacttaatcttgatttaggcctcagggctcctttaacaatcagagtcataatcccatcttgtttagtcataattttggctaataaatctgcttctttatatttctgccttttaaagataataccctgaacttcttttagttcacgtgccatatcatgactcctttagtatttaaaattcattttttatagatattctgatgaagatatcataatatcataaatagtctatagtacaaaaagactgctgtttcagcctccacatacgtggagaatacagtaaacaaatcccaatataacaacaatcacaaaacaatagatcccaaaatttcatcactttgtcattactattgtatctatttttatcccattagttatccaacgaatagaattttcttgtctccctaaacatacaaaaaagacgtcatctttcgacaacgcttatacaacagtaattcaactaaagttcttttttgtcatagcctattcgctttaaaaagttagggtcagaacgccagttatgttggaccttaacccagagacgcaagttgaccttttcaccaagcaatctttcaatctcttgacgtgaattaatcccaatctgcttgagcatcttaccgcccttaccaataataatgcctttttgaccgtctttctcaacatagatagtcgcttcaatcaagagcttgccattttgatgagtattcatatgatcaactgcgacagcagtagcatgtggtacttcttgtgaagtcagtcgcagaatttgttcacgaattaactcggctaccacaaaatattcaggccgatctgtgatctgatcagcaccataatattgtgggcctactggcaaatattccttaatcgttttaagcagatcttcaatcccaattccttgagtagcagaaatcggtagtatttctttaaagccctcaagtttgtgatatgaatccataattggcaaaagcttattaggatgaatttcatcaactttattaattactaaaagaacaggaacttttacttcttttaacaagttggcaatgtattgatcgcccttacccatttcctcaggttcaaccatgaataaaactaaatcaacgtcattcaaactagatacactagccttatccatatagtcgtcaagttttgaatgaggcttaaaaatacctggcgtatctacaaaaacaacttgcatttcatctgaagtataaatacccgaaatgcgattacgagtcgtttgtggtttattagacgtaatggcaactttttgaccaactaaatagttcattaaagttgattttccaacattgggacgaccaactaaagcaacaaagccagacttaaactctttttcttccattatttacctctgccttcatctaattgatcaggatacaatggcaaaccataatcttctaacacttttccttgaataccaaacatttctttggcctcatccggcttaatgtggtcgtagccgtttaaatgtaaaaagccatggactattgtatatccaaattctcgatcaaaacctgtaccatactctttactgtgacgcttaatcacactaggacacataaatagatcaccgatatcctcttgaaagtctggatcatctgcaaatgctgcaagatcaattgaatcctcaccatcttcaattgcaaaggaaattacatcagtaggacggtctttgtcacgatactttaaattaatttcatgactacgatcttcgtcaacaaagttaatactcatctctaagttgttatctttgccaatttccttcttagctagcagcaaaagtttcataatccagtcttgccagttacgcttttcatcatctaaaaagccaacttcatcattataagtaatatcaattggatccatttttagtgtttaatgtcctctttttcataagcagtaataattttcgcaactacagggtgacgaacaacatcattagcagaaaagttgataaatttaatttggtcgatattcttcaagatatgtctagcatcaattaacccgctatgctgtcgaccaggtaaatcgacctgtgtcatatcaccgtttacgaccatcttagaattaaatccaagtctagttaaaaacatcttcatctgggcatctgtagtgttctgggcttcatcaagaattacaaaagcgtcatctaaagttcgtccacgcatataagcaagtggagcaacttcaattacgcctcgttccatcaaacggtcagtcgtattagtcccaagaatagcatacaaggagtcataaattggtctcaaatatggatcaactttttctttcaagtcaccaggtaaaaatccaagtgattcaccagcttcaacagctggcctagtcaaaatgattcgagaaacttctcccttcttaaaggcggcaattgcacaaactacggctaagaatgttttccccgttccagctggtcctattccaaagacaacatcagatttatcaatagcttcgacataacgcttttgtcccatattcttgactctgataggtctacctttagcatccctaatcaaaacctttttatataggtctgcaaagtactctgtggtacccttgtcagccatcttcatcgcacttactgtgtcgggcgcaccgatgttaacaccagtattcacaacactatcgagtgcctttagaacagcaactaccttcttgatcttctcttcatcgtctcctgcaatgacaatctcattaccgacatctgacacagaaagatcataaccttcagaaagaagctttaaatttccgtcattaactccaactagtttttgaatattttctggtctttgaggtgtaaaagttgtttgagccaaatagacccgctccttcttgttactactaatttagctgatcacgaactgattgcgaagcagccttgccatcggcacgtcccttaatctttggcattaaagctttcattaccttaccaaagtcggacttacctttagcaccaacttcatcaattgtttccttaacagctgctctaagttcatcctgattcatttgcttaggcatgtacttttctacaactgctaattcttttttggtttcttcagctaaatcatcacgattagccttaataaattcgtcaatcgattcttctctttgcttcttttcacgattaagaacagttaattcttcatctggagttaaatcgtgtcctgctttaattttttcattcattaaggccgatttgatcatccggacagtattaagagttgtcttgtcgtgattcttcatagctgatttcatatcagccatgatttgatctgacaaactcatttaatatccttctttctattaaaaacccaatagtattataacaaactatgttcttaactaaaataaaactaacaaatatttacttaacataatcaaaattatgcttcaagaagtcaaaaagaaaagctacccaaaaacaggtagctttctcagtagtttattaataatgtctacgcttacgtgcagcttcagacttcaactttctacgaacactaggtttttcgtagaattcgcgcttgcggtattcttgtaaggtaccacttcttgaaacggaacgcttgaaacgacgaagagcatcatcaatagactcgttttcgtgaacgattgtcttagccatgtgtgatccctccttccatttcttggcgttacgccatacatttacttaaattataccaaactaatctttagggtcaatacaattcaaaaactttttgataaatttttaagttaagtaaaccgactactttaccttaataaaagagctgagtttttattgttaatccgctttcattaatagtataattattttcagaaagatatttaataatacacgaggagcttaatatggtagaaacaaaagaccaaaatgaattaaacattattattatttctgatgcggctggtgacactgcttttagtaacgccacagctgcagctgcagaatttcctaactgcaatatcaactatcgtcgttacccctttatcactaaccaaaagaagttggacgaagttttaacagaaattgaaaaatatccaaacttggtaattatctacagtttggttaaagatgaaatgcaaatgccagttatcaaatttgcccgtgagcataatgttgaatgtgttgacatcttctcacctgtagttgaagcaattcaacaaactactcatatgacaccagatcaaaaaattggtgcacagcatagcttaaatcaaaagtactttgacagaatttccgcaatggaattcgctgtaatgtatgatgatggtaaagatccaaaaggtttcttggaagctgacgttgttttacttggggtatcaagaacttctaagactccactttctttgttcttagccaataagaacttaaaggtagctaatttaccacttgttcctgaaactcacattccaaaagaaatctacgaaattgatcctaagaagattattggcttgactaacgatccatctgtattgaacgaaatcagacgtcaaagaatgatcgcttatggtttgaatcctgatactacttattctaatatggattcaatcaacaaggagcttgaatcagcacaagcactttataagaaattaggttgctatgtaattaatgttgctcaccgctccattgaagaaactgccgcacttattttggagcacttgggtattgatgattacgctaagtaataatagatactaagatcaagtatgtccaaaaatcgttctagagtttctctagagcgatttttatttacagaaaaatatttgtaaatttatgcatattactgttctgactcccatgatctaacaatcatctaaaactacctcacacctctattatttatttctttagatctaaacctcattgatctaacaaccatctaaaacgtcttacgcatgtaaacgccgttttcacgggatctaaacctcattgatctaacaatcatctaaaacccgcgttaatgttgatttttctaaattcgagatctaaacctcattgatctaacaatcatctaaaacgttcctagcagggacaagattcaagtgcttgatctaaacctcattgatctaacaatcatctaaaacacgtaagcaccttttgaattggagactactgatctaaacctcattgatctaacaatcatctaaaaccgatatttcataatatctttttaatcaattgtctaataccaatcaacaagatctcgatcaatatatgcaacttgagcatccttgactgctaccccatatttcttatctgtgaattcaattaaaataattttcaatttaagttgtctaacaatcttactaagttcttttaactgtgtttcatcaaggtaatgagctacattacaaaacacgggaatactatcaagattatattcttgatgaatcttaagaactgtttcaattatagcatatggtgttaacatgaaactgtcaaatcttttgtgtaaatagatctttctcgtaaattgattttttaattatttatttaatcaaagtaggattctaaggtgtcctgaacctgaccaaagcctttatgaattcgattgaaataacggtcattgtagctcattgcctgaatgccaataaaagcatcaagcgactgttcagttggaaactctgccttaggcttagctttgcgcttgatcacattgttaaatgattcaatcatgttagtcgaataaattgaagctctgatctgcttgggatagttataaaagaccagcagatctggttctatgtctttcaagcttctgataacatggctgtaaaccttgccccatttggtatagaagtcatgcaggacagctgtggcttcttctttgtttgtctgttgatgcacctgtttgaattcgttcatgatcttttcacgatcgtcgacgcgtactttagcgcagatattgcgcatgacatgaaccaaacagcgttgaaaatgagctttaggataagtcctggccaaggctgttttcatgccaacaacaccatcagaaagaaaaagctcaacttgctttaagcctcgggatttcatgttttgaagcatatctgtccagacttcaatgttctcgctaggcgcaatgcagtagtcaatgacctccttgtgcccattaggcttgatgccaatggcaatatagactgcttcacgctcaaatgtttctcggcgcaaaggaaggtatgtcgcatccaaatagacgcagaaaaacttgtcgcttagcttgcgtttgtggtaagcctcaacctttggaatcatctgcttggaaatatttgatacctgagctggactgtaatggctgccatacatcttttcaattagatcggctatttccctggtggtcacgcccttggagtaaagcttgataatcatgctttccaagatatccgagtgctgcttgtagccaggcagcgtgtgctgatgaaattgaccgttgcgatcccgaggcacttgcacttcaattgggccaaattgcgtatcaactttgcggaaataagcaccatttctagagttgccagtattccagccatttctggcatagggatcatagcccagaaaggcagtcaattcagcttctaacaagttattaacagcctgttgtagctctttgcgcaataaatcatttattttgtctggattgaatagagcttgagcaaaatctttggtaaaatcattcatgaaggagttcttctttctgtatgtgtttttttgttcaaaccaatcatacgagaaaggaactcctttttctaatgtttaaagaaataaatttaaggaatcattcatccttacacaaactattttacagtctcgattaatcaattaattgagcatctaaatgaatgttaaccattttcaacagctttttaatatcttcgctaaaatcaatttctaaaggtaaatcttccaaaagcaaagaatcattcaatactgtttctaatgaataaaaagattttaaaattctatttctgtttacctcatccaagttagaaataaagttcttaataatgacattcatatactttgccataatattgtcatttaacaacggggctcctacaaaatcaaaactcttactaatagacttattgttgtattcgtcatcagaacatactattagatcatttaaggcttgaaaacctaaaaccagatctttataggcaatgggactttgagtgcaaataacattaattccatcttttaaacagattttcttatgtgacaaataggaaacaatcatagtatcactgtcctgtctgaagtattgcgaatatcttttactgcatccccaaccaagaaatgcatatcactgtactgtttttccgtaaccattagactttgcacaacacctttgctaggcataaattttcttattctcttttctaaaaaattagctgtttgtctagtgacacatactctttcatacaccgaaaactgaatcattaaaaatccttcatttattagagcttttctaaattgtcgatattcttttctttcagcggcagtgtccgtaggcaaatcaaacattatcattaatcgcatcattcggtacctcattacacaaactcatctctattctaatatcatctgtttctccacttaaatatctaaggcagcttcttacatatacagaaattgcattcgttaaaattgtattcctaccattgaattttatttgtaagctaagcaactcaactaatccatacttaatatctggtgtaaaactggtaatattttcgtgtgccttaacccaataatcaactatggatctaaatggttccattaaatcacaagctaaattaaattgattttccactgaatgatgatgtattcccagataagtcaaatatccattcattgcaatttctctatcgaaggatgaaagcaatattgagtatccataatctagtgctgcattaatcactccggaatttcttctaataaagtccttaccaaataacttcatgaaatattttctagcagccgctgcttctctattggataaatcgttcacctctaacttgtacagctcttgctcaacttcagtttcatcaattcgataattttttaacaccgatatttgattttttagcttagcagctacaattttggtccataaattttcttttcttctttcattccattcaaattgcattttcaacttctttatgtccctagccccaggataataattcactgtctctgtaacaggttgatatttatcatcaacaaagattaccttgcattgatttttggctaacttacttatcaaagcactagtaatcacagcctgtgatgttgaaattaaaaccaaattgatatcttcaataggtatttgattaataccatcttttgtttggactataagcatattcatagagtatgttagctttgcatgctgagttattattacgttacgccatcccattttttatccttgtacatctatatctataatgatattatttatttgttgggtagctcccaactcttaaccttattgatctaacaatcataatttaaaatcaagcaatgcgttttagtacgcagagtttcaacacttgtcccgagctatcgagggactttttttatgtaaaaatgaggaaccacatgtcggttcctcatttatttttataaactagaaatcttaacgcgtttttcaaacaaaccagtaggtgattgataaactaaaatagtgtccgaagataatgtaattccagaattattttgaagttgaccaaatggtacagttatacccatatctttaagttcacctgtatcagaattatcatgcaaacccttcaaaatttgaataatagctttaaacttatcctcagcgtttaatttcaagaatttttctctacccttatgtaatttatttctaaaatctctaatgtcaaacaaaggtaaatatctatcaatcttttctaaaatttcatcgtaaacatccaaaagttcttgatcttgcttatcagaatctagccaatgaccagtaattactctcattgcctcttctgataaaaccaactgttttgcattacataaataaatagcactctttaacaaaaattttttattgccatcttgcacaacctggttatatggaactttacctttaataatatcaaatgatattactcctgcttttcgttttcccttatcgttgtataaaatacttggtgataaaatttgctttagaatcttttcatagttaccttctttttcagctttatttaaaatagcacgcttcgtcataggtacagcaattactttgtactgtgaagatttagtcttattaattcttacaattgccatataggctgctgcagtaccagtatagccaccataaatatctgttgaaaatcctttacgtttttcaattaatttacgactcttcgctatatcccgttcagcccgaggatatatagtcattccaaacatctcttgattctttgttgtcgtatctctagatacaagcatatatttgtaattatatgccttattaagttgcaatcgaattttattcttttcaaataaaactttcccctgttgagatctgatctcatttggtgctttactacccaaaagtttggcaacaaagtcaaaatttttggtcttttttaaaatttcattttctttttttaggatcagaactaaactttttaaattgaccataaacaaagaatggccgtaatttaggatacgcttgatacagtagattcccacaaatagtagttaaatatgcatcaattgcatggtgataatcattaacctctcgacttttatacaaatcaaactcattacgtaaatagtgattagaactagccttgacaactattattttagtctttggatactcagcttgaagaattgtagttgctaattttatgatttgacttgtctcaactaattgtttacgaataaaacctgaagcttgatgtttattaatattctctggatctaggaataaattattttgttttgctttattaatcagtcctttatcagcccagttattccacatctgcttaaccgttatccctaaaccagtagctagattatcaccaaagagttttaaaggaactccatctgacttaccattgtttattggtttagcaaccaacacacgattattcagggaatcatctttaataaaactttgaggcaagatatggtctatgtcataatactgagatacttcatcaatattaattggcttaccagtataagcatctcttccaagttgcatgaagtgtctgggaaaaaactaagtctcagatcatgaaaaaagaacgttgaatttttgtttcaacgctctttttgtatacttttagctccagccttgatattattaaatcatcacaaaataaaaaaggtggaaactaacatgtacaagaattatatcacaggtcaaactgctttaacacttaatctagattttgccattccggccaatcatttggctaatgtcatcagctggtttgtagattcaattccagaagatgttttagtaggcaagactgctaaaacgggccgcccagcctatcatccagccatgatgctcaaaatactgctttttgcttactccagaagagttttttctggcagaaagattgagttgatgctggaagaaaatctgccaatgatgatcttggctgaccagcaaaagatttcatatcatactatcaataattttagatcaagcagccatgccaatgaactgattaaaaagagctttatctacttcactaacctgttagaagatgaaggcttaatcaatgaaggtgctgcttttatcgatggtactaagattgaagctgatgctaaccgctatacatttgtctggcgcaaagcggttgaaaagtatcatgaaaagctgaaaggccaggcagttgaactttatgatgaattgattactaaagaagtagtcaaagaaatggaaaaagaaaaagttcaaactagtcaggggctaaaggaattagctcaagaaactgaagcagaaattaacaagctgactaaagagattgagcaggaaaacaaagccattcctggcggttcacctcgaaaagccaagcgacgtggactaaaaaagattctgcaccggctaagaaaagattatgtgccaagaatgcaaaaatatgaagaagccgaagagatctttgccggacgcaacagttattccaaaacagatcatgacgccacctttatgcatatgaaggaagaccacatgaaaaatggtcaattaaagcctggctacaatattcaagcagtcacgaccgatcaatatgtagttgattatgccatctttcctaatccgacagatttcaaaactttggagccggttttggatcaaatgaccgtgttggacaagtttgacaaaatcgtcgccgatgctggctatggcagtgaatacaattattcgatgctggaggaaaaatatccagacaagaagtactttattccctacactatgtatgaaaaagaacagaccaaaaagtataagaatgatccaactaagctaatcaactggtactacaatgaaaaagatgattattacattgatcatcatggcgtcagattcaatttcaaatattacagccagcgcaaggatcgttctactggtcaggtccgtgattttaaggtttatgaggcagacgagttccagctaacgccagaattggaacaattggctaaaacagctagcggccgccagcgccaagttcgctataatcctaactggcaatatttaaaagaaaaagcaaaagaagttctccaaagcgaagaaggcagacacatctatggcatgagaaaatatgatgtagagccagttttcggacatttgaagaacgtatttggcatgcgcagaacgcacctgcgaggtaaagagaaggtcgaaaccgatatcggaattgcctttatgatgatgaatttgaacaaatattgtcaaagaaggtggctgaagggccgatttttattgttaaaaattttaaagagaacaaaaaaacgatcaagattcttaaaaaaggaaatcttgatcgtttttattcatctggaagctatttttttcccagacacttaattgattattcttgatatattcagccagcttatccttcaaatttttatttactatatctcctgatattttttggtaaatatcctgtagcttatgccctcgtgtttgtgataacttagaatttcttctactttcacgtgcaaattcaatagctatttgtttaggtgcttgaccagaagcagctttttgaatgtcatgaacaacttttacaacctgcctaatcattttcttatttgcaggagaagtatacgcttctgataaaatatcttccatactatttgaatgcatgagatcttgatttgcatctgtaattgtgccttttatatctgctttatttactatactcatgaaaatttgttggctattccacaactgctcaataatattttgaccatttgaatctacaatagcagttaacaattttttagataatctgccccaaccctgaagtctaatattttgtaggaattgaatttgttttgctgtaagccaatcaattgtttgaagcttttgtatataaatctgcttatcttcaaaaatagttgaccattcaataattttttcaaaatcatcacgaaattcatttgagtcaagtttatcaacaaataaacctgacttttttaatttaatgtatgtagataaactagaattaaatttagtttgatcagctaaccccttaattttgatataaggcaatttctgattttctattaaccaatttttaagctgcttagctgagacagtattattctttttgaataagtcctcataaagttcttgctttacgctaacagataatttcttcccattcacactaattttatttaattcatccaaaacagtatatttttgatataaaagactatttgctggaagaacatcttcaccaaacaaataagtatcttttgttgtaagtcgtttaataaagttatttgcagacttttgtctatcaactttttcatcaaaattccaaggcgtaattcgacctttagcttttctaaccatccaagcaaaagattgattttgtcgagtttgaggataagatgaatttgttggttcaatcattggaccaacatagtatggcaccctaaaacgaatcagttcatcaagcttataaggtgcctgcatacgatgagctttaattggattaatctcttttaaaaatggataatattttccctgattttcaattatcttatctagctcgatttgattaagctggaagggaattacgccgttttcatcgcttcgttgcttaggcataaacttatctaacgctatttcttttctaatttgaactgcctcttttgatgcatccaaattctttttaactatttcataaaaatcgctttttcgataaaggtgcttgttgggaaaggcttttttagtttcaacatcaacaaaatgacggttattgacatatttgtcgtaagccaactgtaaattgtgagcttttttcctgtctgaatggttcttgattactgtttttagcaatttcaaatcttgggcatgatcgttatattttcttatcatagattccgataaagttgaaccttcatcgacaatattcagtagagaaattgcactaaataagtttctaactaaatccaatatctgtaactgagtatcagttaaatcagaagtaatttcactcaaatttacatccgcattttcatcatttaatttaaaattccaaattgagctgtcagtcttgtctacatttacttgtaaaataatttcaaattttgctttgtatcctaaaattgctttgctaatttcttttgaaatttttttacttagttttagaccagacttattttcagtgtcgggtaacacatcagcaatttcttttatcttatccagtttaaacatttgttcatttcgaataatgtcttcaacttttgaagcatttcctgcatcaaaaatcactccactttctggcagaaatatggaataaagatcgtttagttcatttacaaacctatcgatttcaatctttgacgcactaaaattacttatggatgaattagacaaaaaatttcctcgatatttcacgatatgatgaatggcaatataaatagcccgaagatcaaacttcttatcctgtttcattaaagcgtttcttaaatgataaatagttggaaattttttataaaattgtttatccatttttttagttggaaagacaattgaagacacatttttccttgtgtccaatggagaaagtcctgactcttttaaacgagcaaagaaatttggatctacctttgccatttcttcatcaaaaatttcttccaacaatttaagacgccattttcttcgctttatacgcctcctagtagttctaaaagctcgtctatcagcagctgatacgccttcatcaaacaagtgcgagccaagtgctctttttccatgcatttttaatatattattatcaaaatcagtagcaacccacccacatgaattagtaccaatatctagaccaaccatatattcattatttaacttcgtcattattattctctactttcattgtccaaatgagactgtaaaatagtttgtgtaaggatgaatgattccttaaatttatttctttaaacattagaaaaaggagttcctttctcgtatgattggtttgaacaaaaaacacatacagaaagaagaactccttcatgaatgattttaccaaagattttgctcaagctctattcaatccagacaaaataaatgatttattgcgcaaagagctacaacaggctgttaataacttgttagaagctgaattgactgcctttctgggctatgatccctatgccagaaatggctggaatactggcaactctagaaatggtgcttatttccgcaaagttgatacgcaatttggcccaattgaagtgcaagtgcctcgggatcgcaacggtcaatttcatcagcacacgctgcctgactacaagcagcactctgatgttttggaaagcacgattatcaagctatactccaaaggcgtaactaccagagaaatcgctgacttgattgagaaaatgtatggcagtcattatagtccagctcaagtatcaaatatttccaagcagatgctccccaagattgaggcttatcacaagcgcaagctaagcgacaagtttttctgcgtctatttggatgcgacataccttcctttgcgccgagaaacatttgagcgtgaagcagtctatattgccattggcatcaagcctaatgggcacaaggaggtcattgactactgcattgcacctagcgagaacattgaagtctggacagatatgcttcaaaacatgaaatcccgaggcttaaagcaagttgagctttttctttctgatggtgttgttggcatgaaaacagccttggccaggacttatcctaaagctcattttcaacgctgtttggttcatgtcatgcgcaatatctgcgctaaagtacgcgtcgacgatcgtgaaaagatcatgaacgaattcaaacaggtgcatcaacagacaaacaaagaagaagccacagctgtcctgcatgacttctataccaaatggggcaaggtttacagccatgttatcagaagcttgaaagacatagaaccagatctgctggtcttttataactatcccaagcagatcagagcttcaatttattcgactaacatgattgaatcatttaacaatgtgatcaagcgcaaagctaagcctaaggcagagtttccaactgaacagtcgcttgatgcttttattggcattcaggcaatgagctacaatgaccgttatttcaatcgaattcataaaggctttggtcaggttcaggacaccttagaatcctactttgattaaataaataattaaaaaatcaatttacgagaaagatctatttacacaaaagatttgacagtttcgtccaaattattatttttgagcccaattaatgtctactatcatttactaaattcaatgtaaacgttattaatttaattctatgtaaatcccaaaataaagtaaagaaatttcaaaaatacctagactcgtaattaaaaacatattcacatatactcatactaactttttgttattaatcgaaatttaattgtaactttctcgtaaaactgctgagctacaatagtttaggtgaattaagagaggagataaaaatcagaacttatctggtttctttttataatgaaatttcgtaaattaataatttctttgttaggtactgcattattaacttcaagcgttggtttatcaaccaccactgcttctgctgatacgcttgatgactcacaaaatacaactgaagttcaacccaagaacctcaagtgggcttatccgtttaaagccaacaagaaaaatggtgttcgtccaatgtataatgcacaaacttttggcataactaactatatgcgttctactacaccaccttcctactttcatgatggttgggattttggtttttcagaagttgggcattctaacgtatatgcaattcatcaaggtactgttaaaaaggttgcttatggcaacggccttggctggttcatctgggttattagtcctgataattacgttgaagtttaccaagaagggtttaataagaaaaaagacatttatgttaagactggtcaaaagattaaattagatcaaaagatcggtaagctaactggctcacacttacaccttggcgttactcaaacaaataaagattacataaacaaatatggttttccatgtaagaattggaacgttaacaacggaacttggctcaatccaatcgaggttatcaaaagcaacttaaagaaatagttaacataatctaaaatattgaaagtaaaaaagcaggtcacagcttataacagttatgatctgctttttattaatcccaatgttccttgataaacttagctcttccaccagcttcttccattgcatatctaagtggatcttttttataaaaatcttggtgatattcctcagctggataaaatggcttagctggttcaattttagttacgattggtttatcaaatttaccactagcttgtaatctttgcttagatttttcagctgcttctttttgagcaggtgaattataaaaaattacaggtcgataattatcaccacgatcttggaattgccccattgcatctgtgggatcagtcacttgccaataatagtttagcaattgatcatacgatatttttgctggatcaaaggtaatctcaacagcttcagtatggccagtcgtacctgaacagacttgctcatatgttggattagcaacatgaccaccagtataaccagaaactactttttctactccgtcaactgtatcgaaaggttcgaccatgcaccaaaaacaaccgccagcgaagattgctgtgtcgttgttgggttttgccttggtatcagtggttttggcttgtttattattctctgtcattctttgaaatacctccattttatttgaattttattgcttttttaagttaactagtattatatacaaataaaaatgagatgcactttttattacctgatgtatcccattttatttctttacaaattattgcgtctttcttcaatatccttttcaatctgttctaaatcatcttcgatagcaagatttaaaataaagtttttcgtcgttgacctcttattaatgtaaagcttacgggcctcatttttatcattccactttttatttacttctgtatatttagccattaaaaatcactttccataatgctatagcaatcacaatcaaaacaccagttaacaaagctcttttaggatagaactttaatgaccatttagtatttttgccagtatgagttaattttataggctttcggcatatttgtcacctcttagctccgattctcttagcctcctttcactatatacaacacacgcttttacgtgtaacgcgaatgatatttagaaaaatatgccaaaaagggcatcaatctggccgtctaaagccaaatgatgctttaattgttttttcaccaaaatcaatagcctaacttaatgacactgtttttacataaacttattaaatttataattcttcatattttttgctctttaattaatttgttatcaaaattgaatacaacgattagtagctaagtccttcttacgattaccagattaccaattcatctcgattctattttagatttcttagcatcttttcactatataagtgaacgcaatctccgtgcaccatcaacaatatttttaaataatatacaaaaacagtcactctatagaacatatttttcagagcagctatttagcctccacatgtgtggagaatacttaagcctcatcttttggctgatgtaacgacttggatcacctccacatgtgtggagaatactaaacggctgtggcgttgacacagctcaaagtaggatcacctccacacacgtggagaatacgctaactggataccagtcatcaccgttaacagtaggatcacctccacatgtgtggagaatactctgccttgtctcccgtgcccttcaagatgataggatcacctccacactcgtggagaatacactaaatgatccacgatatatcaacatccctcaatcgaaataatatcatttttaatcacttttaacaaagaccaataataaagccataattacaaaaagccactccaaataaaaaagaagcatttctgcttctttttgaatagttttgctcccaaagtgcccctaggattcaaatttcatttataaatccttatatatcaaggtttaagggctatccattaaacgatttcttgctccttgaagcgaccatatactttttcaacttcactaacactcatgaaagcatacggatctgctccttgcacgatttggcgaatatcatacatatcatatcgatcaataatggtaatcaaaactgtcttttcaatatgactgtatgcaccttcagcatcatgcaaaatggtaattcctctatgcatccggttttgaataccatcgataatatgctgtgggtgctgagtaacaatcattacttgcatcttctggtgttgggtataaaccgcatcaattactcgcccattaataaaaatagtcaaggcggaataaagagcacgtggccaaccaaacatgtatcccgcagcagcgataataatcaaattaataaaaatattaaattttccgtaactaatgcccgttttttgcctaattacaataccaataatgtcgagtccaccagttgaaataccgttctttaatgccatcccagttccaataccgttgatcgaagcaccaaaaatcgcacaaaccagtgggtccaggtgcatctgccaaggttgaatagcgtgcatcatgatagaacctagaacaacagcaacgatggtgaagaaagtaaatttatgtcctatcttgaaccaagccaatataaataaaggaaagttcaaaagaaagtacatcattgatgttgataatgtaaacggtagatatctttcacttacagtattaattaattgcgcaaaacccgtgattcctgacgagtacatatgccccggcgtccaaaaaaagttcaaggcaactgcaaccgcaattgaataaaagaaggcagctgacaattttgaaagaaaattgtagcgtcggttgaacttatcaagttgatccatagtttgtcaaatcctttgagcaaatactaatagtaaacacattaattttaacaaaagttttgctgctgaccaatctaaatagacatttttatcacttttgttaatcggagcaaaaaatgatactattcagttaatattaattagtctatccaaatagaaaggtgtctttcatgagttcttactatgaattaatgtggcgtgacgatgaactaacttcttataccactgacaagctgaattttatctacaacgcaatcgatcatcccttgtctgtccgctatagacagttatatcctaatcgattagactggcaaaaagccgtaaacagacacaatgcagctattcaaaaagtcaaagaccttcttattgaaagaaaagatagtcataatatacgtgaagcttggtttaaactggatcccaatgcacgaactaaagcaaacaatggttttactgttgaacaactagctaataagttcccttacatggcaaaacaacttggtgcctttatggaaattgaaaacatcgaaatcaaatactttgatggagaatttaagcctagatatgacttagatgatttttctgatattttttctgccaattatcccactagtggctttaaacaaagtggcattactcaagaagctttactgaagctctaccctaacatcagtgctaaaaatttagaccaaattttaaaaatggccgactgtgaattagagcaagaaaatggcactgaagttattccttattggtatgctgtcaatgctaaaagaatgctaatcgatggtgatagttttgctgcaacctttgacgactaaaaaactgaccgcttggtcagtctttttattggataatttgaacaccgtgttcatcaggatgtaagattaatgtctcatcttttaaatcatgtttacgtaagcccgacaaaaatccagctacatgtttatcttcaatccacgtcataatcgttgaacctgcgccgctcaaataagttgccaaggcatgttttgaatgagctacctcccgcacttttacaagttctggcactagtttttctcggtaaacttcatggaatacatcttgttccattaattctcctgctttagggtagtcttgagcaaacaaactagcaattaaagtattagcaactgctgagccatgcgtagctacgccaaaagctaattctttaggcaaaactgctctagctgtcttagtttccaaattataatcgggtacataagccaccaacgcatatggaggaagtggtgcttcaactgcatcaaaatgatggttaacttcagcaccaacaaccaagccgcccaaaatagtcggtgcaatattatcaggatgtccctcgattttagctcctaattgaaccttttcttcatctgatagtcccagcttaccaatttgattagccaattcaattccggctgcgatagcacttgaactgctacctaaaccatgagccaatgggatattgcttttaacgcgtaaatgaagcggtggtaaccctggataaactgttagtgcagtcttaacaattaaatttttttcatcatgtggaattcctttcatcacatgatccacctgaaagcgatcggctaagcttaaaacttctacttccaaataaagtgaaacagccatgccaagtgaatcaaagccaggacccaagtttgccgttgaagctggtgctttaataatcattttttcccttcctttactgcaaaatcttatagctagcttttaaatattgatcttgaatcgctaaatcttgtagctgctgtcgactaatattttcggttacaactacaattcttgattgtacttgtttaatctcacgaaccggaatttccaaatcagagagtaatttactcaaatcaaacaaggtctcttctgcttcgaaagataaataataggaatacttcacatcctccgaacttgttaattgcataacatgggagaaattactaaatggctgaccggtggtctttttcactacgttttttatttcagtaatcacatcactcatgactgaattagccgttgcagagctacccgcacctgggcctgtgaatactgctgttcctaggctttggctcttaatttgtaaagcatttagttcatttttaatatgcgccataatcgcattttctggcaacaaacatggagcaacttctacaaataatttaccattaatatttttggcaatcccaatcagcttaatgacatagcctaacttctgagcctgtttaatgtcaaaatcctttagattattaatcccttgaatagtaaaatcatcaatactaatcttagtaccaaaagcaaacttgcttaaaattacaatcttgtatgctgcatccttacctgtaacatcgttagtgggatcagcctccgcaaagcccagctcttgagcatttttcagcgcttcctcgtagcttagtcccttttcccccatttgtgacaaaatataattcgtcgtaccattaataattccttgaatttcggaaataatgtcactggaataagaggtagccaaggtccgcaaaatagggatcccacctgcaacgctagcatcatacattaaatcacactttttacttgcagctaaattaatcaattctgaaccaaaagttgccattaagtctttattggccgtaactacattttttccagcattgattgctgcagtaatatattccttagcaggatgaagcccacctattaattcaactataattttaatttcgggatcttgcaaaatcgaatcgaaatctgtagttagcatcacttcgttagctaaattacgatgtttttctggattacgtactagagctttttcaatgatgatttcttcaccacttgtttgtctaatcttctttttattatttttaattatttttaaaacacctgaaccaactgttcctaatccaagcaatgcaattttgatggccatttgatcttatcctctttttaatgattttcttatttttacgattgtatcataggtgctaatcaaggtacaatagttataatattaatatttcataagataggaagattgtttatgcaatatcgtagtactagaggttcaaaagaaaacactttaactgcacctcaagcaattattcaaggcttggctcaagacggtgggctttacgtgcctgttgcctttcctcaagctaattttaagttagaagatttatccaaactttcctacaagcaaatcgctgccatggttattagcttattctttgatgactttactaaggagcaaatcaccactgcagttcaaagcgcttatagtgaacaatgggatgatcgcagcattgttccaatcgaaaagcacgataaccatttttacatggagctttttcacggtcctacccttgccttcaaagatatagctttgcaaatgttgccacaattaatgaccagagctgttcaaattgaaaagattgataaagatattattattttaaccgctacttctggcgatactggtacggcatcaatgcgtggctttgctaatcaaaagggtaccgatgtcatagtcttttatcctgaaggtggcgttagtcctgttcaacttaagcaaatgctcagccaacgcggcaacaatttgcgtgcaattgcaatcaaaggtaactttgacgatgctcaaactgaagttaaaaaaatcttcaacaatgattctttcaaaaaccgacttaatgctaatggctatcaattttcttcagctaattcgatgaatattggtcgtctggttccgcaaatttcttactacctctacacctatggacaattagtacgcagacaagaaattaaactaggagacgaagttaactttgctgtgccaacaggtaactttggtgacatcctagctggatattatgctaagaaattaggtttgcctattaaaaagttgatttgtgcatctaatgaaaacaatgtattgactgatttctttaataatggtgtctacgataagcgacgtaagttccatttaaccaatgcaccagcaatggatatcctagtttccagcaatttggaacgacttttatttgacctttatggcgaaaataactatgaagtcgctagtttaatgaatcaattgactcaacgcggtcattatcaagttagcggtgaagttttcactaaattacaaaaaaattttgcagctggttttgcaacagaagaagaggttaaatcagaaatcaaacgggtctacaattatgaccgctatgtaattgatccacatactgctgttggctcttttgtagcaaatcaatatcaaaagaagaccggcgatcaaaccccaatggtcattgtttcaacagccagtccatataagttcccagaaacggtgtatgaagccatcactggtggtcctagtatgcaaactggcgtcggtgcaattaaagaattgcatgatgaattaggcggtcaattatcaatcggtgtgcgtgccctttttgatcgtgaacccaagaccgaaaaaattattgaaccaaatgatatggaaaaagaaatcagttcaattttagatttgaaataataattaaggaaaaatagatatgaaagttgttaaatttggaggttcttccctagcctcaggtaatagcggagataaggccctaagtattattaatgccgatcccgaaagacaagtcgttgtagtctcagcaccgggcaaaagaactgaggatgatattaaagtaaccgatctaatgatcacttacgcatatatgagcttgaggagtaataattatcaagacatcgctacccgtatttttaagcgttatgaattaattgcccaatattttgagctgcctgaagcagaattagaggatattaaccagcttctacttacattgccgaagctaagttaccctaataatgactaccgcatggcaacctttaaagcacacggagaacgtcttaatgcaattttgattgctaaaattttaaatcatcaaggaattaaagcacgatttttagagccaaaagatgtaggtttaattgtcactggcacttctaataatgctgaagtcaatcctgaaacttatgtgaacttaaaaagaattaaggctgcaaaagatgaaaagatcatttttcctggcttctatggcattacaccatcaggacatattgctactttctctcgcggtggttctgacattaccggtgctattctagctagggggttaaacgctgatctttatgaaaacttcaccgatgtcgatgctattttttcagccaatccccatatcgttgatcagcccaagccaattaaaagaatgacttatcaagaaatgcgggaactatcttatgcgggattttccgtctttcacgatgaagccttaattcctgctattcaaggcgaaattcctgtcaatgttaaaaatactaatgctccagaaaaacctgggacaatgatcgtaccagaggacggctttatacctaaacacacaatcacaggtattgccggaggcaaaaacttcgcggccctttatttaagaaaatatatgttaaataaaggtgctggtttcaccttgaagttaatggaaattttgcaaaaacatcatgtttcatatgaacatatgccatctggaattgatgatattaccattattttcaaaaaagatgtcttaactgatcaattaattgatgttatctgtaatgaaattcaaactagtctaaatcctgatcaaatgcagtggattgatgattatgcaatcacaatggtggtaggtgaagggatgaaggacaagctgactttatgtgctagcttgctttaccctcttggtaaaaagaacatctccattcaaatgattaaccagggtgcatcccaaatctcaattatgattggtaccagacggcaagatgaagaagtagttatcaaaaccatttatgataatttcattgctcaggataaaatttaacataagctataatataacaaataaaaaaatggtaaatctggttattagtaccttgatttaccatttttactttatgagattatctttttactaaaaagtaactcccggatttaaaattgaagtgcaacactaagtgttaaacaaaaaggccatgaagacctaaacttgaagtgacgaaaaatcaagaaaggaagatctttatgaccaattcaaattctagcatttctaagcactatcatcaattaaccagcgtacaacgtggacaaattcaagcaatgctggattccggcataacttcccgtactgttatcgctcaagaagttggctgccataagtcgacaatcagtcgcgaaatcaaacgcggaagcgtcctgcaaagagacagcagctatttattgtatgagcactattacgctgatactgcacagatttattatgagaagcgtcgcaaaaactgctatcagcgcaatccattgaagcattatgctgtctttttgagaatgctctccagacgctttaaagctaaatttgatgccaccagcatcgatgagttcgttggtgaattcaaaaggactatgccaggctacccttgtcccagcacaccaactgtctatcgctatattgatcagggcttgctggacataagcaatattgatctgcctatgaagctcaaaagacgcaggaacaagcgtcatcacagccatggcggtcacgctttgcacaagaagcatcttggcaattccattgaacagcgtcctaaagagattgaagacagaaaagctccgctgcactgggaaggagatctggttaaaggcgtcagacgcaagaatcagcctgctttaatgactttgactgaaagaaccacacgctttgaagtagttatcaagattcctgactatcgggcaagcacatgccaaaggctgcttcaaaaggagattgacagacatcctgcctggtttaaatcaatcacgtttgacaatggctctgagtttgcggatatgaccaagatcaagggctgccagatttactttgctcacccatattctccatgggaaaggggcaccaatgagaactgcaatggtcttttgcgtcaattcttccctaagggcaagagcatgaaagacaagtcaaaagcttatgttcaacaggcaactgatgccattaaccacaaatatcgccgaatcctccaatatcacacagcagaggaactcttcaagcaatatatctcttcataacctaactgttgcacttaatttgacaattcaggaaaaagtaactactttatactccaaatatttttctccatcaaagttcattttcacaataaatggattctttggctggatcatagcaaaggcttcatatttaaagcttggatcatagtaattaattactgatccaattgctgtaccatgtccaccaataatcatagtttgatcttgatatttggacaaaactagcttcaaagcagcaacatttctcttctgcgtctcttttaaagactcgccatttcttagcttataatcaaaatcttcccactgtctttcacaatattcatgaaaattagaaatccactcatcaccaatttttctttctctaaagtcagaaatagatgataatgttagtttcttctcgtctataactggttgaattgtatcaattgcacgcttgaatggactagaaaaagcttggtcgatgtgtttatctctaaagtaatcagttactttttttctatcttgcaaccccttttctgtcaaaggacgtgttaaatcatcatgaactgataaatcaggttgagcatgtcttacaaaatatactgttgtcataattttctccaaagcgataacagagactgtaaaatagtttgtgtaaggatgaatgattccttaaatttatttctttaaacattagaaaaaggagttcctttctcgtatgattggtttgaacaaaaaaacacatacagaaagaagaactccttcatgaatgattttaccaaagattttgctcaagctctattcaatccagacaaaataaatgatttattgcgcaaagagctacaacaggctgttaataacttgttagaagctgaattgactgcctttctgggctatgatccctatgccagaaatggctggaatactggcaactctagaaatggtgcttatttccgcaaagttgatacgcaatttggcccaattgaagtgcaagtgcctcgggatcgcaacggtcaatttcatcagcacacgctgcctgactacaagcagcactctgatgttttggaaagcacgattatcaagctctactccaagggcgtgaccaccagggaaatagccgatctaattgaaaagatgtatggcagccattacagtccagctcaggtatcaaatatttccaagcagatgattccaaaggttgaggcttaccacaaacgcaagctaagcgacaagtttttctgcgtctatttggatgcgacataccttcctttgcgccgagaaacatttgagcgtgaagcagtctatattgccattggcatcaagcctaatgggcacaaggaggtcattgactactgcattgcacctagcgagaacattgaagtctggacagatatgcttcaaaacatgaaatcccgaggcttgaagcaagttgaactctttctttctgatggtgttgttggcatgaaaacagccttggccaggacttatcctaaagctcattttcaacgctgcttggttcatgtcatgcgcaatatctgtgctaaagtccgggtggatgaccgcgaaaagatcatgaacgaattcaagcagatacatcaacagacaagcaaaaaagaagctgcagctgtcttgcacaaattctatgccagatggaataaagcttatagcaatgtcatcaaaggtttgaaggaaattgagcccgatctgctggtcttctacaattatcccaaacaaatcagagcttcaatttattcaaccaatatgattgaatcctttaacaacgtcatcaagcgtaaagctaagcctaaggcagaatttccaactgaacagtcgcttgatgcatttattggcatccaggcaatgagctacaatgaccgctatttcaaccgaattcataaaggctttggtcaggttcaggataccttagaatcttattttgaataaataattaaaaaatcaatttgcgagaaagaactatttacacaaaagatttgacagtttccgataacatattattatacgcgtggtgctagttaaatcgttctagacaataagccaaattataagctaaaattgcaatttccaaccggctttgaaagcctatcagactacgtgctcgattgttctcggcattgtaataggtcagaagcgaaaagtcgctttcaattgttctgcgaatagccatcaattgatgatcattgtgctttttagctcctgtcatatttttacgatatggtgtccaaagttcataacccatttgttttagctgttgatgcagttctttgcctaaatagccttcgtcgccaagaagatagtaattagatggatgggcattttccagcagttcaactgtctccttggcatcatgaactgatgcttttgttacgacataatcaagaatggaaccgtcatcgctaacaatggcatgaactttgaaaccatagaagtaaattttcttggtggccttataaccaatgttggcataaccgcgaaaaattttagcacgatagttgcgaattggttggcaaacaggtaccggaaagctgtcaatgatcaagaaatgtccattcaggtcaacctttttattcatttcttgccgtatctgataaatcaattgcaatagctgacgtgaacgccgattaaaacgtgagtgtgataaacaattgaaacattcacagaatcttctttgtgattcaattcctgtcttagcttgccagataagtaaagccaaaatcagactgtccgtagttttaatttgatcaatatttcgccgatgagtaaactcagccggtgcatacaaacgataccagtgccgacaaattatcactaaatctttaaaactaacttgtaaatggtggctaaaacgcttaagcttaaggcagttcaatcagatcagactcttttctttttgatactacaacttgagtctagtccgattggacttttttattaactaaaacgatttaactagcaccacgcgtattattatatttttacttccgttatttgaatcagattttacttaatctaattcataaattcaataataaattaacttttccttgctctaatccaatttttcacgatacactaaaagcaaatgtttgtatactcacgaaaggattttatatgggattagaaatactaaatcatactgatcaaaaactaatttccaatgccgatttttggcaattagttgattttcaaagagagtcaaataaattctctgagtttaaaggcgtttcctttgtttctaatattaaatttattgagcaaaatcttataccacgttttgaccagatcacactaattcttggactaaccgataatggatcaaattcaattggcaaaagaattgaccaaattttaaataaacgtcgtgatttgattgaatatagctacgaacaccaagatagtcccttcactaaacgtattttagatggtagtttacagctttttttcaccaaacagaatttgattcacactaagctttatttaatggaaaatcaaagcaagtactctgccttttcaggttcaatgaatcttaccgatacggctgttaataaaaatatggaacaattagtttgggattacggcaatacttctgatccattattcaattgctatcaacaaatgtttcaagataaccttaatcaggctacaacttatattaatgctaaaaaactatctggttatttagaagacaaaaataaagacgatcttcgcattcatgtaatgcaagattcttctcttgaaatcaaaaacagtcctaattcaactggtaaagacataattattctcccagctgaagagataaaaaagtatcgcgaccactacagcaaagatgatgaattaaagaaattatctgaaaatgaaaaactcgttgcttctcaaacagttactttatttggtgaaggtggcaataaaagacgtaagctagatacaatcgggcaagatttatatagcttgactcagcacattattcgtcaagacaaaaaggcaaaagcagatacatcacaaattgaaaaagaagaagatctcttccctgttcctgttcagttttacaataatggtcaattattccaagcctctaaaattggtgataacatcccttctgaagttattacttctgatttaactgaagggcaattaaaaaatgcgcttcaacttttctgtgatatcactcatgaatataatacttacaaagaagttggtgaaggctggcaagcttgtgactttatgctgtttctatatgaatcaccatggctttggaaaatccgcaatttatatgaattatctggaagcaatgtatctagagaagacgtgcctattgctacagcactaatcggacaaggtcgaactggtaagtccaccctagggaaaagactagccgctaaattaattggtgctcataatttcttagatagtggaatgatggatccaaagaattatgcccttggcaagagtaatatcaatatgacaattaccaacacgctaagtgactatgtatatacaaatggtcctgtaagtccattaatgattgatgatgtcagtcccgagcttacaacccgtacttactttgaaagattcatcaaggaagttactaacaatcgtaatttaactcatccctcaccagcattcattttcacgatgaatagacaagaaagctctattaaatcacaattttctctaaagcctgaaattatgcgtcgtttatggtatttaagctttgaatctactttttcaggtgaaagtgatcaacgtaatgctgcattaactagcttatttagtcgtgcaaatgatgatctttttaaatattgtcaagttgaattagcaaaattctttactaacgttagtgttgaagatgcgcagaagattgaaagagacttcttatatccaatcaagcatgttttaaaaactgcacttgataaatttgatatgtataaccaagtcagcaaatattttgaagaaaattacgattactccctatttgttggtcgaaatgattggggaatgttaatcaatcaagcaaaaatcggaagcgatatcttatttattaaacaagatgaccggctaaaagcccaaatcaataaagaacttttcaataaaatctccgatcaaacggcgaaaaacagcggttctactatgcttgatcgctactttaaatatttgcctagaaaatatcacattgcatcgcaacaaactagcaccggttttattattgatgttgaaaactttgataaatggcttgatgatgatacgttaatgaataagtatcaaaacagtagttcatttagagataagcaacaaagagataaccaagcacaattgactcaaacagttgatatgctagctaaggcaatgttagaagatcgtgaacagcgacgaaaagaagaggctaaaaagaaacgaagctggcttggtaattttttccacagaaattagtttataaaagatttcatattcaaaataagacttttaacctcttaacagttaaaagtcttatttactatagggataataatgtttggactttgattgatattcttttacagaaattatcttattttgatcattaaattctataattgatacaccatcgaattcactaatttttccttgataattacatttaaaatgccattcggcaatgctcgtatcaccattaattatgagtctttctattggccaagcaattacttttccttgtttattccaattttcaaaccaagatattatctcctttttatttctgtaaactggaccatagcattcactataaatagcattttcgtcaaatgtattttggactacttcaagattaggacttagccatgctcgaaaataatttctaattatttgctctttatccatttatagcgatgtccagcctttcttgtgaaaatggttaaacaagtttttattttctcttaaaagttgcaaaatattttgtttatcatctactacaatattcttatcttgtaacaaacccataatcgaatttagttgctgatagtcgacatttccaagtgtcaaagtcatatttgttcccttacctaaatccaaaatcaaatttaaataatcaggattaaagtcaataggactaagacgtacatttttacgatagacaacggcagctttctttacatcagataaattaataacttgcttactctttttatgtaaccctagcagttgcatcaattttatcacatcgttaatatcataatttataattgtaatattttcgctactaatctgccaatacggattaaaacaagtaggtaaagttacaaatacacctaaaattagtacaataaggaatagccaccaagcttgataaccaaatcctgtcaaaaatagtgaaagtaaaactaccacaatcataccgattaaaacatggctcaatttaacaggagttccaacaataatttttttcatcacgttcaccttcttactttacttcctatataatattataaagcgctttcaaaaataaactatagaggttaaaaatatgaaaataggtattattcaagctacatcgcaaaaaagtaaaaatttcatattagagaagtatatcaaagaatctgtaggatccaatgatcaagtattcaattttggtatttatcaagatagttcggctagtctatcttacgtgcaagtttccctagctgtcgcattattaattaatagcaaggcgactgacttcattgtgacaggatgtacttctggacaaggaatgatgcttgcatgaaatacttttcctaatattcaatgtggttatatccccactccacaagatgcttttctttttggtcatatcaataacggcaatgttgtctcctttccactaggacttaattggggttggagtggtgaaatcaattttgagcagactataaaaaatctttttgaacagccttggggacaaggttatcctccttcacaagcaaaaagaaagataagaaatgctcaagaagttaaaaatctcaacgtaattagtaagaaatcaatgattgacattatacctaaaattgatcctgatcttattttccctgtgctcaattatgaaccgatttataacttcataattaaaaacggaaccgatcaaaaattaatttcaattatcaaaaggataaaaaatgactacaaaaattgaaaaaatatctcctaaaatctacaaagtaactgataacgataagcatctaggcactatttctacttatcacaatctttttcataacaaatatatttatctaaaattcaatctaagtgattactctgtaaatattccattttcaaaaatagttcaagcagagcaccaagcattgcaagtcatgattgattcaaatgaaaatccaatcgtagattttttattaagaaatggttttatctgcaaacgacactgttatacgcttaccgttaacaaaaaagatttaaaaattgagatcaataacaaattatctcttcattttttcaatacagaaagtcccgattacgaaactgtcaaatcttttgtgtaaatagttctttctcgtaaattgattttttaattatttatttaatcaaagtaggattctaaggtgtcctgaacctgaccaaagcctttatgaattcgattgaaataacggtcattgtagctcattgcctgaatgccaataaaagcatcaagcgactgttcagttggaaactctgccttaggcttagctttgcgcttgatcacattgttaaatgattcaatcatgttagtcgaataaattgaagctctgatctgcttgggatagttataaaagaccagcagatctggttctatgtctttcaagcttctgataacatggctgtaaaccttgccccatttggtatagaagtcatgcaggacagctgtggcttcttctttgtttgtctgttgatgcacctgtttgaattcgttcatgatcttttcacgatcgtcgacgcgtactttagcgcagatattgcgcatgacatgaaccaaacagcgttgaaaatgagctttaggataagtcctggccaaggctgttttcatgccaacaacaccatcagaaagaaaaagctcaacttgctttaagcctcgggatttcatgttttgaagcatatctgtccagacttcaatgttctcgctaggcgcaatgcagtagtcaatgacctccttgtgcccattaggcttgatgccaatggcaatatagactgcttcacgctcaaatgtttctcggcgcaaaggaaggtatgtcgcatccaaatagacgcagaaaaacttgtcgcttagcttgcgtttgtggtaagcctcaacctttggaatcatctgcttggaaatatttgatacctgagctggactgtaatggctgccatacatcttttcaattagatcggctatttccctggtggtcacgcccttggagtaaagcttgataatcatgctttccaagatatccgagtgctgcttgtagccaggcagcgtgtgctgatgaaattgaccgttgcgatcccgaggcacttgcacttcaattgggccaaattgcgtatcaactttgcggaaataagcaccatttctagagttgccagtattccagccatttctggcatagggatcatagcccagaaaggcagtcaattcagcttctaacaagttattaacagcctgttgtagctctttgcgcaataaatcatttattttgtctggattgaatagagcttgagcaaaatctttggtaaaatcattcatgaaggagttcttctttctgtatgtgtttttttgttcaaaccaatcatacgagaaaggaactcctttttctaatgtttaaagaaataaatttaaggaatcattcatccttacacaaactattttacagtctatgcatctgtgcaacagtatgctttttcccgtcataataatatcgcttaacaattttatctctaacttgatcatttaagtcttgtacctgagcctgctgctgataatcaactaaagcactcacaccatagtcaactaacataatcagaaaagcaagaacattgattaaaataaacttagtccaattacgacttaaaaggatattcgtctcttcttgtacaacgtaagtattggtaattgataaagcaggaataataatccaaccaattgcagttaaccagaaacgaactggattggttttaataaaagctttcaaattcatcttactttatcccctttcttactttttaatttaatttcttgatcaaattttgcttttaattctggcgtaaagttgtgagcaatcatcaaaatagtttgatctgttttgagcaattcatcaatgattttttcggtagctttttgatcgatcgcactagttacttcatccattaaaacaaacgattgctcgtgtatttccgttcgcgctaaaacaactttttgccgttgtccaccagacaaattttcactttttagatcaattgttgtattaacaccatctggcattttggctaagtcggattggagttgaactgcttgaacaacatcttgaagcttatcctgcaaattttcgttaaacattgtaatgttctctttgatcgttgcgggaaaaactactggattttgcggcatattgccaattctagcttttccttcaggaatgatagtttcattttcatctagataggtcaccgtaccagattcaggttttagcttacctaacaaaacattaaacaaggttgattttcctgttcctgaatcgccagtaagcaaaactttctgccctttttttattgtaaaatcaggataaaaaattgtttccccctgatcgtattttacagacaagcctgaaactttaagaccgtaggctgatactttatctttattttcatcaggaacttgctttcttaaatcggtaatctgttcgcgtaaagccttagttgacttaacttgcgttaacgactgagtaatattccaaattgctgaaaaaatcgtaaatgcaaaaccactagcaactgcaaaatcaccgaatgaaatcatattaagcaaaaatatgattccagcaataaagctcataccaatttgtgcaattgaattgctaaaagcattaatcaaataacttacacttcttaattttgcactacccttacttgcgtccacataatcactacttgatcgatgaatttgcttaaccaaacgactgtatgcactataacgacgtagttcctgcaatccaccaagccaatgagcaattgtatttaacagcttttcattctttttatttactttatctgtggcagctgatgttttcttctccataattttaggagcaaaaagtgtaatcacagctaaaatggcagtaaccaaaattagaatccagttcatgcttgctagtaaaacaatagcaatcacaatctctaaaaccccacttaagatagtaatccaaggtgtagcataatcatctgataagatttttaaattggctgttaatcggttctgcatactagagactttttcatcacttttttcataatagtaatgatgcatgatttcttgccgaattttatgcagatagttttgcgtctgcctagtgaaaacaacggtagtaattggtaaaagcaacgaagtgaataatgctaaaacaaactgcattatttgccaataaacatatgtattaaaattaccagcagtaattgaattcagagcatatttaaataaatattcactaaaactcccaaataatgcgtataaaacatacaataagataataatgcaggctcgaaacgagactgtaaaatagtttgtgtaaggatgaatgattccttaaatttatttctttaaacattagaaaaaggagttcctttctcgtatgattggtttgaacaaaaaaacacatacagaaagaagaactccttcatgaatgattttaccaaagattttgctcaagctctattcaatccagacaaaataaatgatttattgcgcaaagagctacaacaggctgttaataacttgttagaagctgaattgactgcctttctgggctatgatccctatgccagaaatggctggaatactggcaactctagaaatggtgcttatttccgcaaagttgatacgcaatttggcccaattgaagtgcaagtgcctcgggatcgcaacggtcaatttcatcagcacacgctgcctggctacaagcagcactcggatatcttggaaagcatgattatcaagctttactccaagggcgtgaccaccagggaaatagccgatctaattgaaaagatgtatggcagccattacagtccagctcaggtatcaaatatttccaagcagatgattccaaaggttgaggcttaccacaaacgcaagctaagcgacaagtttttctgcgtctatttggatgcgacataccttcctttgcgccgagaaacatttgagcgtgaagcagtctatattgccattggcatcaagcctaatgggcacaaggaggtcattgactactgcattgcacctagcgagaacattgaagtctggacagatatgcttcaaaacatgaaatcccgaggcttaaagcaagttgagctttttctttctgatggtgttgttggcatgaaaacagccttggccaggacttatcctaaagctcattttcaacgctgtttggttcatgtcatgcgcaatatctgcgctaaagtacgcgtcgacgatcgtgaaaagatcatgaacgaattcaaacaggtgcatcaacagccaaataaagaagctgcgatcaaagtcttgcacgccttctatgacaagtggaacagagcgtacaaccatgtcatcagagatctcaaagagattgagcctgatctgctggtcttttacagctatcctaagcagatcagggcttcaatttactccaccaatatgatcgaatcctttaacaacgttatcaagcgtaaagctaaacctaaagcagagtttccaaatgaacagtcgcttgatacttttattggcattcaggcaatgagctacaatgaccgttatttcaatcgaattcataaaggctttggtcaggttcaggacaccttagaatcctactttgattaaataaataattaaaaaatcaatttacgagaaagaactatttacacaaaagatttgacagtttcagccttttttctagttttattttcttaactaatccattaggttttacatataaattcttaatattatttcgctattataagatcaattaagatgaaaggaatgagaaccttgattaaactactcttaattggtggatcatttttaacgcttggtttaatggccatcagctcagtattaattaataaaccagcagtagcaaaggtaaaacatcgccactaaaaaccagaataatatatgttaataaatcttttcccctctaactagaaagaccaggttatgtactccacatagcctggtcttcttttcgtcttattctttatggttggtagaaaattgcaccttggtcaacaattacatctggttgcaacttacgtaaactcttactttcaacacaatattttgtattattcaaatactctttgaagttcttagtttccaagtgctgcttgtaagcttcattattacgataaacttcaatagctaaccattcatttggttgatcggcaacagttcctgcaatcattgccaaaatatctttttcttcttcgactgccgttttcatttctttcattacagcatgagcaaactcatcgcccttacctaaagaaacaccaatttcagtcagataaataacataatcatttgatccggtaactgctagtttttctgcctttgtagaaataaattccggaaacaattctacctttactcgactagttaaaatatctttagcaacgtcagtaaaatccttaaattgctttgaattagcatgagtatcataacttgcttcgtcttgatagcattctactacaaaattagtagtttcttcgtcatgacttgtctgcataaacaatgtgcctggttcgttttcttgagaagtaagcatattatgttgccctgccttaacgaactttgcatgatcctctttattagtttctagtttatataaacgcaaaattggtgtttgttttaatttcataacttctcctccaagaattaattttgtcattattatactaaattttatcgcgtctattagtaaaaaacatcccttagttaagggatgtcacaaaactataacgtgtaattaactttcttaaacttgtagtccttcatttttttagctaatttcttgcttctgaagtagttaccaccatcatatctactagaataaaccagcacgttatgctttttaccattaatggtttgtggtaccactcgataaagactccaattttcaaaagtaatccacggatcaatctcatagaatgtatcattcttcattttggtagttttaccagacatccagttttgcgttaccttatcaaagttcttctggttagcaattctaccattgaagtaatcactaattgtcgaagcctcctgggtaaatattggtttgccattaacagtatgttcagtaaaggtgatctttgtgccattatgtgcattacgatcataagagtaccaagtaccctgcatcttttttggaatagtaacctgtacaccattaccataagttgaagcatcaacagtctcaacttgactagccaaaccagttaatcctaaaacaagtaccattgatgttaaaggtaacaaagttctttttagcataaaaatcatctccagaatgtaaaatatatgagtccgctttcataatatattttacagtatcttatagtacttagacaagatatttttaactttacagattaatattcttgctgcaatagctttataaactcactacttaacgctgaatttgacttataaaaagccattatcttttgctttattaactgaccatgatcaagcaagaaaagtggctgcaaatctgtagtattaattaacctagccgtattctcatttaaaataaaatagccagacctagaggcgaccaacagtgctgcttcttcgaccgagttagaagcgatgaattgactgccaatttgatacaaatctttaaataaatgtagctcactaacctcttcttcaggtttagccacaataaaacaagtcatatcattgagctcgtctttttcaatcatttgaatgccattaggatacattcccttgggcaaaattgccattacaccagcttgagtcaattctgtttcatcaaagttaagattctcgtcacgcaaatcattgattgctatgtctgcttcatcttcattcagttttgcaaaagcaccatcatgactagtcgcaagtagttttacatctacattaggatgttttaacacaaaatgctgcactgcctgatctaattccttacgacctaattggtcaaaatatgcaatctttaattccgtcattttatttttcatccagcggtgcgtgtccttcttctgctactcttcttttatccttagtatcttcatgcttattaagtgccatcaaggcaaaaaagatcaaattcaaaccactaactacaatgccaaataattttattaaattgagtttcttttctttactcattttttaacctcacaactaaaaataatcataaaatgatacatcgcctttaacgaaatctaattttttgatgcggtaatctgtaattaatcctagtttaacagcagcattcatggttagtctacctaatagcacctgggtccacgcggtaattgatcccgaaaaatcaaccaatgcatcttccttacgttctaccgctaccttacgtccatgattacttaattgccaaactccaatattccaaggacactgttcatcgctattgacttccagattaaaatcaccttcttgcattggccgcatacaagccaaaactttttcaaaatcaataattcgactcatcatataaggacgcaaatcaacttggagttcgttttgttcaggaaaaagttcagctcgtaacgatttctctggtacgctcattttaaattgcttaacactgcccgcgtgcgaacccataaaaccaaacatactcagtaatccctgcggcgtaattgcgtacatttcatcagctaaaaaagtattgtctctaatgcgataaatcaagtaactaattggccgctcatccgcgtcaaaataaacggctacattgcggtgatgataataagaatcaagtctattccaccaccatgcctcacgtacaaccgtgttacgttcatcatcagtatgcagttgacgttcataaagttgaatcacaccattttgaacagctaaattgtcccacttgccacgcactatatgaccagaacgtggtaatttaaaactacgcaatgcgcttccatcaaagcgatattctttttgataaatactattgctaaacccgtactggcgataaaagctctccgaaaatggtgccaggttagcaaacggaatatcttgcctatgtaagtcatgcaaaatttctttcattaattgggaaatatgaccttggccacgatactcaggatatgaagctacataacctattccagccatcggtaaatgatgcccaaaaacatcacttttaaatcgattaaccataatatagctagctaatttttccttatcaaaatagccataacctgtactatgatcataacgactcataaaattttcgtctttagtcaaatcattatttttcaaaaatgcatattgaattaatgccgtaatttgctttaaattattcttatttttctttaattccatgcttattcctatacgtacatctataaatttattcattactattttagttcattttttaaatttttaactagatttttcataaaaataaaccggaatcataaaatcccggtttattttacgcaacgtattcttgataaagctgagagataaatgcctgcatctgttccactgaatgtctccggctacgagcacattctttagcagggcgatcacataaaaagcacttacgtggctgcctgcccaaatctctgcgtgaaattgcagcttgtttattttttaccaacacgtctgcatcaaagagacgtcccaatgatatctgattctcaaaatcaattgttgagcgctttactttttcaattgacaaagataatacataaaagttttcacagccactatcatcattaagctgtgtcaccaatttaaaatgataacctaggttagtccaagcattttccagctcattgatacccaacataaacattttagttaaatagcgattattcttgattggtcctgggatattcatattaatgtcgactagagtttgattaggatacttattaaaaatcttatgttgtacagctactcgcctatctttagctgctaaaacttgggcaatatcctgcttttttccttcattaaaaatattcatttttatcacccagttaattataaatgattgtgccgactccgtctgctagtttgttggcattgctcaaagaggtgataattgctaaattacctgttttttctacaaattcaattgcagcttctatcttaggcttcatactcccagctgcgaaataacctgctgctagatattgtttgagctgttcaacttttattttaccaattgcttgttgattttctttgccataattcaaaaatgcatgatccaccgttgttagaattactaattcatcagcgttgatatcttctgccattttagcagcggaaaaatctttatgaattacgccggcaacacctctgagatgcccatctttcacaataacaaggatgccaccaccgccacaggcaatcggaataaataaatttcctaaagtagccgccatcactgctttaattgaatgcaatcgattttcagcttctgtaaattgccaagcatactttgaattaaagacctcatcagttacttccatctcatttaagccatatttttcatagatttcttctcccacctgagttgttcgatcatgaaaagctgtcaaacaatgcataaagatcaattggtcatctggtgtaccagtcatttgcatcattttcattgtgaccgtatatggctttaataatttaattcgttcagaccaatcattttcacccatcgaaaccccaacatcggtataaacaacattggctcctttaacgccttgagcaatatcatctgtgatcaaattttttgaacctgaatcttgggcaaaattttgagcaattttttgtacatcaggatgtgtaaacaaaggcttgggtgtaacaatatgtacattaacacctaacattgagccacaaactaaaagactgtcggcaacattatcgcggccatcacccacttccaaacaggaacgccagaatatttagccagctcttctacatcttcttgagcaaaaccgcgatattcaattccatcatacattgagcctaggactttagccgtatccttgacgctttcttttttacctaagtggatctcgcttgcgcctagatattctggatgagcacctaaatcattacaagctactacaaaagcagatcgcgtcctagttgaggctttttcaaaaagtagtgcaatatttttacctttcagatattcatgtgggatatgctcttttttaagttcttttaaatgtaatgcaaaatcaattaaatatgaaatttcagctggagtatagtctttacaatcgagaaaacttctaccttgaaaaacattttgtaaatatttcattttttgcctcttataaatcttcacgaatcaacggacacgacatacatctaggaccgccacgaccacgtgagagttcactagaccgaatctcatgaacgatgatgccatgttttcttagcaaatcattggatacataattacgatcataagtaacgacttcacctggtgcaattgccaaggtatttgagccgtcattccattgttcacgtggtgcggcaattggatcaccaccaccagttggaattaaatccaattcgcttaaatgtaagttttctttcaaaacctgcaccaaatcattcttttctgtgatttttacaccgttgtgatcatcgggctgtagaacataaatatcaattttgccggctttatctaaaataaagggatgaaccgtaaattgattataattaatcattgtaaaaactatatcaaggtgcatcatagcatgattgtgcggaatcttaatcgctaaaatcgtatcataacttgaatgatcaaataaattatgagctaagtcagtaattgcagttgcagaagtgcgttgtgaaatacctacagctaacacatggttatttagaactagttcatccccgccctcaaggcgaccatgatgataacggtcacgccaaactggaatagttgcgttcttgaaatcaggatgatttttcaaaattgtttccataaataatgattcacgtcgtctagctctgaaagtcatccggttaatggtcatccctgaaccaattgcagcctgttgatctcgagtaaaatatacatttggcattggatcaagataaaaagggtaatctgggtcctcagccaaatctgctaaagatggggtagaattatgaatcgcactttttctaattccagcaatcaccgtttttaccatttccttagttagcaattcttggagatagttcagcaataattgatgcaaaggatcctgttttttaatacttgattcatccagtaactgatctaagaatgcccgacgaactttctcatctgttaaagattctgctaataaatcctcaagatataatactttgatcccctgctgcctcaatacatgcgcaaaagcatcatgttcttcttgggcaatcttcagataaggaatatcgtcaatcaacattcgatgcaaaatatctggggctagattttctagttcttttcccggtcgatgtaacatcaccgtttttaacttaccaatttctgaataaacatgaatcggactcgacattcaaccaccttctattaattattgtacccgtttacatttattatggatcaattaggtaaaagttacagtattatcatattgcagcaatgatttttttcattaaaggtgtaacttgatgatctttacgccaaaccagctgcaaatgtgttatccaattagcatgtttaattgcgatcatattttcttgggcataagttgtcgcaattgattctggtactagcgctactcccatttttctcttggcccaagtaattgctgtccgtgaatcatcacacttaaccgcataaaatggtttaagcccatgatgtgcaaaagtttgattaaaaatatcctcaaagcgacgataaataatcaatggctgatctgctagatctttaatgcgtaattcttttttttgctgaaaatctgggtctacactaatagccatcattttttcagttgttaaagtcttagtatttaaacctgtctggttgtaaggcgttcgtacaatgcctagatcgattgtctttttttctaatttatccaggatgccataagtattatcttcataaatatcaaaagaaatttccggataatattttcgtaattcattaaaagaattcattggtatcaagcccgttgaggaagatgccattccaattgcaatcgttcccaattcaccggaaatagtcttatgtacttggttttcagcattttgagctagagaaataatttcattggcatagctttgaaaaatttgtcccacatcagttagctcaataccatgtgccgttcttttaaataattgcgcgcccaactctttctctaattgttttaattgatagcttaatggtggctgtgcaatatacaagcgcttagcagctgctgtaatctgcttttcttctgctacaactagaaaataacgtaactgttttagattcatattatttatcctttttttatttcaattgatagtgatattaaaatatttaatatcttatattgtattttagtattttattcatagcaatatctgtgctaccttattaaggtagatttggagggaaaataatgtctgataaatttcacggcttaactcaagccgaagcagacaagcgcttaaaagaagatagcttaaatgaagtaccagagcctgaatacaatttctttaaagagttcttgtctaagttatggaacctatccgcttggattctagaagctgctttaattctagaatgtatcttgggcaaatgggtccaatcattattcgtgttgttgatgcttttatttgctgcatttaacggtgcatctaagaaaaagcaatcaagacgagttttaaataatatttcacacaagttgactcctactgtatcagttgaacgcgatggcaagtggatcaaacttgattctaaacaactagttaaaggcgatttaatctcacttaaacgcggggacgtactcgcagcagatgttaaaattgttgacggtaacttagcttgtgatgaaagctcaattacaggtgaatctaaaccagttaagaaagcaattgatgacaccgcctttgccggtactacagttgttgaaggtgatggcctagctgttgttactgctacaggtaaagattctagaagcggtaagacgattaatttgatcaacaattccgctgctcctggtcacttacaacaacttttgactaagattatctactacctttgcttactagatggtgttttaaccttagttattattatcgcctccttcttcaaaggcggtaatttcaatacctttattaatatgttgccattcctggcaatgatgtttattgcttcaattcctgtagcaatgccatcaacttttgctttatccaactcatttgaagcaacccgcttaagtaaagaaggagtcctgacttctgacctaactggaattcaggacgcagctaacttgaacttgcttttacttgataagactggaacaattacggaaaacaaaactgccgtagccgcttggactgatctaagtgacttgcctgacaaagacgtgcttgctttagctggagccgcaactgataaacgtaatgctggtattatcgatacagcaatcgatgaatacttagtagaaaataacattccagtcatgaatgctgaaaactttactccatttacttctgacactggttattctatggctgatgttgctggacataatgtaaagcttggttcatttaagcaattatctttgatcgataaacatgccgatgaagaaatttctggaattaatttcaaggcaggacgctcagtggcagtcttgattgacgataagttagctggtgtcttcatcttacaagataaagttagaacagactctaaagcagctttggctgaactcaagaaacgtggcgttcgcccaattatgttaactggtgacaatcaaaagaccgctgctgcagtggcagaacaagttgatttaactggtaaagtaatttcgattcacgatttcaatgaaaatactgatattaatgatttggccggtattgctgatgttttaccagaagataaactcaagatggtaaagcttttccaagaaaaaggctatatcgtagggatgacaggtgacggagttaacgacgcgcctgcattaaaacaagctgaagtaggaatcgcagtttcaaatgctgctgacgtagctaagcgttcgggtaaaatggtattactagacgatggtctaggctcaattgttaaaattttagacgctggacatcgcgtataccaaagaatgactacttggtcactaaccaagcttgctagaactgctgaattaacgatgctgttaacttttggctatcttttctttgactacatcccaatggccttgaatgcaatggttatctataccattatgaacaatatggttacgatgatgattggaactgacaggactcacattacttataagccagaaaactggaatatggctaagcttgctaagatcgccttttcactagctgctggttggactttaattggtattgggtttgtttggttcttaaacacacacggttggagtcacggtgctgtttctactatggtttacgtatacctagttcttagcgcaatgttgattgttttgattactagaactcgtaagtacttttggcaagattacccatccaagttggttggtagtgttcaaattgcagatgttctattgacctttatcttagctctttgtggttgggcaatggtccagatttccattcaaaacttagcaattactgtaattgtagcgattattgctgccataataatcgacttaatttaccaacctgtgatgaaaaacaggtagattattaccataaattttataaattaaaagacttctaggaactttgaactcttagaagtcttttaatttatctttttgattcacgatatcctgctgcacgtgctgctgctttactcttgaagaaaactgcattttcacgattcattcgataattatgaccgcgcattacgtgaaagatttttgatcgtttattatcaacaattctgtaattactggtataaatcttagttttatcacgatattgatgctttctccttctgtgatgaatagctgcattaacaactgatgtcgacccctgcaaatttgcaggcagaacactgatttctcccactaacatcagaaatgcaacaatagtcacaacccaattcttgcatcttttcataaaaacactcccttaatatgtcactatatttatatagtatacgtttatatatgaagtgttcctacgtttattagaaactagtttgaaactgtcaaatcttttgtgtaaatagttctttctcgtaaattgattttttaattatttatttaatcaaagtaggattctaaggtgtcctgaacctgaccaaagcctttatgaattcgattgaaataacggtcattgtagctcattgcctgaatgccaataaaagcatcaagcgactgttcagttggaaactctgccttaggcttagctttgcgcttgatcacattgttaaatgattcaatcatgttagtcgaataaattgaagctctgatctgcttgggatagttataaaagaccagcagatctggttctatgtctttcaagcttctgataacatggctgtaaaccttgccccatttggtatagaagtcatgcaggacagctgtggcttcttctttgtttgtctgttgatgcacctgtttgaattcgttcatgatcttttcacgatcgtcgacgcgtactttagcgcagatattgcgcatgacatgaaccaaacagcgttgaaaatgagctttaggataagtcctggccaaggctgttttcatgccaacaacaccatcagaaagaaaaagctcaacttgctttaagcctcgggatttcatgttttgaagcatatctgtccagacttcaatgttctcgctaggcgcaatgcagtagtcaatgacctccttgtgcccattaggcttgatgccaatggcaatatagactgcttcacgctcaaatgtttctcggcgcaaaggaaggtatgtcgcatccaaatagacgcagaaaaacttgtcgcttagcttgcgtttgtggtaagcctcaacctttggaatcatctgcttggaaatatttgatacctgagctggactgtaatggctgccatacatcttttcaattagatcggctatttccctggtggtcacgcccttggagtaaagcttgataatcatgctttccaagatatccgagtgctgcttgtagccaggcagcgtgtgctgatgaaattgaccgttgcgatcccggggcacttgcacttcaattgggccaaattgcgtatcaactttgcggaaataagcaccatttctagagttgccagtattccagccatttctggcatagggatcatagcccagaaaggcagtcaattcagcttctaacaagttattaacagcctgttgtagctctttgcgcaataaatcatttattttgtcttgattgaatagagcttgtgctatatttttggtaaaatcattcatgaaggagttcttctttctgtatgtgtttttttgttcaaaccaatcatacgagaaaggaactcctttttctaatgtttaaagaaataaatttaaggaatcattcatccttacacaaactattttacagtctcactagtttaattacttatcttcatttgcaccaaaaatatccaaaaattgtaaaaacaagttaacaaaatcaagatataattgcaaagcacctaaaactgcaagcccattagttgaaagatcatcaccatattgtaaataaatatctttcattctttgtgcatcccacgcagttaaaatagtaaatataatcacagcaataatcgaaaaaacgtagtcaatgattggattatgtaaaaacaaattagctaacatggctacaatcaacccaattaacgcagcagaagcataagaccctattcgactcaaatcttttttggtaattgttcctaaaatcgccattgttacaaagacggttgccgaagctacaaatgctgaagcaatattttgtccactatatgcacctgcaataaaagcaaaggtaacgccgtaaacaattggtgttgtgcaataaaggcagagataggtcccgcaaaaaccgtcattgtcaaataagcactaattgctgaaacgaaaaccgctaaggccatataaccatatattttgctaaaaaacatttaatcctgaatcattagcatattgctgttgaccagattcttgatcaaaattatccatcttaatttctccttcttaacacataccctgtactttaaatataacacctgtttaattaaaaacgtagcgagacaccctaccaaaatataaactatctcggtcactttggactagacctacaataaaaaatatcatataattggtatagacaattatcaaaaatgaggtactattatgacaatgagatctttaggtctgtcaatttatccaggccacagcaaatttgaaggcaacgctcactatctggacttagctcacaaatatggcttttctcgtatcttcatgagtatgcttgaagtacaaggcagccctgaagaaaccaaagctaagtataaaaaaatcattgaatatggcaataaattgggatttcaaacttttttagatgttaatcctgcaatcttcaaacaactaggtgtcagctatgatgacctgaaattttttgctgatattggtgcagcaggcatccgtcttgacacaacatttgatggtgcaattgaagcaatgctttcttacaacccatatggtctaatcattgaactcaacatgagtaataatgttgactatcttaacaatattatttcttaccaagctaatacaccgtttatttatggctgtcacaatttttatcctcaacgcggtactggcttaccttacgacttctttatcgcttgttctgaacgcttcaaaaagtttggcattcattcagccgcttttgtctcaagtcaagtaggtcaaatgggaccttggaacgtggaagatggtttaccaacgcttgagcaagaccgtaatttaccaattgatgtgcaagcaatgcatctctgggcttctgggttgattgatgatgtaatcatcggtaatgcttatgccagtgaagccgagttaaaagccttatctaaagttaatcgctatcaattgatgttgcacgtaaactacgttactgatgttaataagattgagaaaactatcgtagaagcgcctcaacatttccgtcgtggtgatatcactaaggatgtaattcgttcaaccatgccccgtgtaacttatgcagatattcctaatccagtacacgacaacaatgtagaattccaacgcggagatattatcattggtaacgacaactttggtcattacaaaaatgaactacaaattgtccttgaacctcataaggagtcaaggatgaacaaagtcggttctattagatcagacgaattattcctgctcgactttattaaaccatggtcaaaatttaaattaatcggtaacaaataataaacattctaagctaaatagtgaattagttatccgacgggataattgattcactatttttattcttttgtagaattaaagtagtggtaaaacgatatgccctgaggtctttagacacttgatgtcgcataataaactggcagttttacttaagttttcaatagtctcttcgaagaatgtggacactagatgtcgagtttagaaaattagatctgatttcttaagtaaatacgttttactactaagttttggaggtttttattatgcaagttacttttggaattgatgtaagcaagtctacttctactgtttgtgaactaattggtgaaagcaaaaatgaactaaccattactaataatcgtcctggttttattcaattgcttcatgaattaaccgctttttctaaacatccgcaaattatttttgaagctaccggtgtttattcacgcagactgcaggcttttcttgaagactacggctatgaatatgttgttattaatccgcttaaagccaaaaaagagatgaatatggggctacgctacaacaagaccgataaaactgatgcttatcatttagctttaattcaaagactttatcgccatccggttaatcaaagcgaatcccaaacttataagcagcttaatgctttgagccgcttctatgaccagctgacaagtgacttggtaatagctaaaaatcgacttcaccaagctctacaatcgacttttcctgaaattgaaaatttattttcttctgctaaaggtaaaaattactggcaaatagttgtgcgatatcctcattgtgacttagtaagaagagaagataaaaaacagcttattaactggttaatgagcttaaaggggattgcttttaaacacgctctaaggactgcagataaattaattgaattagcttatcaagcttatccagttgtatcttgctctagcatagaagtcgagcaagtgcagtattatgcacacagattgcttaatttaagtgatcaaagagaaaatttaatcgcaagaatggttaagttagcgaagtctttgcctaatcatgatttagaaaacctagaaagcattccaggctttgcacagaccactgctgtcagagttttagcagagttaggagatttacgcagatttagtaatcctaataaaatcaatgcttttatcggaattgatccaggcagatatcagtcaggagaaatggactctaatttaagtattactaaacatggcaatgcagtcgcacgtaagttgctttatcgagctattggacaaattgataatgcagctaagacaaatccgtgtcatatagcagattattatgaaagcaaaaagctatcctctcaaaccaaagggttcaaaaagatagctattgcttcaattcataaactaatcagaaccatttatgccctgattatcaatgatcaaccatatgattacaacgtagccacacataatcaaaaagactttagtcgtaattaattgatcaagtacattataacgctaagcccaaaaatcagatatggatctgggcttatttgtcgtgtctaactaaaaaaataaatcgacactaaaagatgtttaagttgaaatttaaacaaaaaatgaagccaaacttcttattatgcttgactttacgtagaaaaagacctaaaagtgtctaacttttaggtctcagttcaaattgatttaattccctctttttatttattctattttaagcaccatgatattgaacaagtgaataaatatcaacatcaggtaatttatctctaccgtgtaaatctggcaattcgatgtagaatgcggcaccaactaacttaccaccaaggttttcaattagctctttagaagctcttaaagtacctgcggtagccatcaagtcatcacagacaaccactctttgtccaggtttaatcgcatccttgtgcatttccaaactgtttgaaccatattccaaatcataggaagcacgttcaacttctcttggtaacttatgtggctttcttgcaggtacaaaacctaaacctaactcagtagctactggacaacctacaataaaaccacgtgcttcaggcccaacaattacatctgcttttttactctttgcatattccgctaattcatgagtagcggcacgatacaattcaccatcttgcaaaattggtgtaatatcgcgaaaaacaatgcctttgttaggaaaatccttaacacttgcaatatatttactaaaatcaactgccataagaagcataacctccaaaatgctctgtgtttgtgttcaaacgcttttgaccagtatattttaacaaattttaacgataaaagcactgaaaacagaatagttatctatttatttgtcaaattattaacatatgtaatcaaacgttgactaggcatagttcttagttgattaacaaatttaatctgagaagaagttcccattaaatatttagaagctgtcagcggctgttttttaggagaaggctctcctaccaatttaccttcatccaattttacaaagcctaattcaaagaaaactcgtaaaatgaaaagcacactatcataatctagtcccaaataaggtgcaactgtacggtaatctgctggctttaacgtagggtgactataaatatattttaaaacagcaccaaaataatttttagcgggaatttgttcaacaggcaattgatcaagcaaaaagcgtaaatagatttgttgataatctttctccaatgcagcatttaattcaatctgattgcgtggcacatctaataatgcaactgtttcaccagtttgatcataatctttaactaaagagatcttgtcttcatcgatctgtagtcggttgcgaacaatcggaatatttttttgatcaaataacaggtagcggtccgcgaaacccataacatatttctcttggcgtaagtcaacaactggcgttggcactgccaattttggtgaagcaaaagctagtccggtcatgattccttgtaaagaaacttgatttcgataagtatttaatgataattgaacaaaaatttgagaaataaacggcaaaagattattattcaaaaagcctttattaaatccaataactgataagttaccgccttttttagcaaccgtaaatttgacatgattcttatctttacccattttaaagaaatgagtgattgttggattagagatactaaagattggctgcgtgtcacctgtcccaaatggacctacttgattgatttgtgctagtgtctgcggagttaagccctgcataggcaattccatgtcatattttttagtctcaagaccaccttcaacatgaaagtcatcttcaaatttttcccgtaatggcgcaatctgattttcttctaatgataaaccacaggcaaaatcatggccaccaaatttggttaaatattgatccttgatcggatttaaagcatcaaacaagttgaaaccagcaaaggacctacctgagcctttaacctcacctgcatcatttttagtcaaaacaatcgtgggtttatgtgtcttttcaacgatcttattagctactaaacctaacacaccttcgtgaaattcagggtcatataaaaccaaagtattttgtttttgccagctatttttatgaattaacgtcatacatttgtcatagacttcggtggttaattctttccgtttattgtttaattcttcgatcttatctgcaattttttgggcctcaaggtcatcatcacttagcaaaagctcaactgccaagttggcattatctaatcgacctacagcatttaatcgaggagcaatattaaagccgacatcagtttcattaatactgcctaaagtcaaaccagcatttttgattagagcgcgcaagccaggacgatctgtctgattaagcatttctaaaccacgcttaacgataatatgcccctctccggtcaccttaaccatatcgccaatagttccgatcatagccaaatctagcagctcaggcatagtatcctgcattagaccacgacaaatcgtgtaagctactccggcaccacaataatcatcaaaaggatatttttggccaggataattacaatgaacagtagcataagctgccggtttcttttcttgaaaagtatgatgatctgtaatgattacatcaacattatgttcttgagcatatttgacttcctcgaccccagtaacaccattatcaacagtgataatcaatctggttccatcagctacaatatcttgatagcggtccatattaggaccatacccatcattgaagcgattaggaataaaataatgaacatcagcgcccaaaatgcttagggtttcagtcataatagtcgttgcagtaattccatcagcatcataatcgccataaattgtaatcttttcgccgctatcaattgcttgattaattcggttaattgccttatccatgtcatgcattaacgctggatcagccagattttcttctgttgcattaaaccaaaaatcaagtttttcgtctgtattaataccccgcaatgcaaaaagtttggctgcaatgggacctagttgatatttctcaatcaagtctggtgctaattcatcagctgttctttcttgccatttcattaattatcaaacaccttatgttctctcatcaaaacgaaaaggcactcattgttgagtgtctttattacaaaatctatttataattttatcgcaaatctaaatctgattaaagattgtaaatttttattttaatttaaaaaccttaagattattgttgttagccttttcagttttaatcagattaccccgaattgcccaacgattcttaccgccatcagcacaagtaatcaaagttacaatattcttcttagtattatcgactagccaaaccgcagttggatcaacaatctttttcatataaattcgatagacatatactttgttaagattagttaaataaactaactcaccttttttaacatcttcaagtggtgagaaaagaataccttttgctgtcatgtagtgacctgcaagaggataatttcccttacccattacttggtcggctcgcatcgtgccgccaccagtcgacattgcatcatcactcatccccaacataatcggtaaatacatattaacatcgggaatagctaacgcaccaatcgcaccagaagtctttttcacttgtgatcttgctgcttgtgcaatgcctaaagacttaactttactaaaatcatacattccttttttctttttgttttcttcaattgtctttctatttattccacttaaagtagattgttgattatgatgaattaattgatcactgatctgtttgttaaatatcaaagcaataccaacaagcaataatatgatagcagcaactctaagtaaaattgtacttacactattttttttatttttagccatttttatttaccgttgatgtcatcatcgttcatcttcaagactgccatgaaagcatcttgaggtacttcaactctaccaactgctttcattcgcttcttaccacgtttctgtttttcaagcagcttagcccgacgatctggatcaccagtatggattttccaggtaacatcttttcggtatggcttaattgtagctcgagaaataattttagctccaattgcgccctgaatatcaacttcaaagttttgccgtggaattagtttttttagcattgaagtcatttgacgggcacgatcttgagcttctgatctgtgagcaataaaactcaatgcatcaattggctccttgttaagcaaaatgtcgatcttaaccaaatcagtagcacgataacccgtaatttcataatcaagtgaagcataacctttagtcgaagatttcaaatcatcaaagaaatcaaaaataatttcagctaatggcatgttgtaaattacattaactcggtacttatccaagtaatccatggtaacgaattcaccacgcttacgttgacaaagctccattactggaccaacaaaatcatttggcaccataatttccgcttttacataaggttcttgaacttccttatattcaccagcatctggcaaatcagatggattatcaatcaccttggttgttccatcattcataattgcatgataatcaacagatggtgctgtcatgattagatcaaggtcaaattcttgctctaatctttcctgtacaacatccatatgaagtaagcctaagaagccacaacgaaacccaaagcctaaagctgttgaagtttcaggctcaaattctaaagctgcatcattcagctgtagtttttgtaaagcttccttcaaatcttcataatcacggttgtcaactgggtacatcccagaataaaccatcggtggaatttgacgatagcctggaagtggttcagccgttgggttatcagcttgagtaattgtgtcaccaacacgtgtttctcgaacggacttaatgttagcagtaatatatcctacatcccctgcgattaaaatatccttcttaattggatgaggactagaaacaccaacctctgtgacttcatattccttgccagtattcataatttgaattcgatcgcctggtttaatagatccatcttcaattttgacagacattaccactccgcgataatcatcatatttagagtcgaaaatcaatgcttttaatggagcagtaatatcaccagacggagctggaatatctttaactaccttttccagcatgtccttaataccttgaccggttttacctgaaacttcggcagcttctgaagcatccaaacctaacatttcttcaatttcttccttagtcttaggaacatcggcagatggtaagtcaatcttgttaattactggcaagattgccaaatcgtcatcaattgccaaataagtattagccaaagtttgagcctgtacaccttgagaagcatcaaccaccattaaagcaccttcacaggcagctagagaacgtgatacctcatatgaaaagtcaacgtgtcctggtgtatcgattaagtggaaaatgtagtcttcaccgtcttcagcatgatatttcacttcaactgagttcattttaatggtaataccacgttgacgttcaagtggcatatcatctaacatctgatttttaagctgacgttgactaactgtatcagttaattctaagattctgtcagcaatagtcgatttaccatggtcaatatgcgccacaatagcaaaatttcgaatgtgtttttgatagtcttttaatttttttaaatccataaaatcgttcaccctttactatgtattaattatagcaaagctagaataaatgatgaaattgtagcatagtaaattttcaataaaatgcagagtttttagaataataattgaaaattcagcattgaatattttccaagaaaaactctaaaaatcaccaaaaaattaattgatcttaaaaaaggtttctgttgcaagtagcagaaacctttttagcatttacatattaaacttatcttttaagcgttcaaaaaatcctttttcttgtggtgtaatattgccaccaccatcatgaacaaagttggtcaaatctttcttttgcttatcattaatgtgctttggaataacaatattaactgtagtaatttgatcaccattgccattaccacgaagatatggcacaccctgtccacgcaaagtaaacttcttattaggttgcgtaccagctggaatagttagctttacatcaccatgcacagtcttaacgttaatttcatctcctaaagtagcctgagcaaatgagattggtacttctgtataaatagtctggccacgacgctcaaaatctttagatggtttaattcgatagttaatatataaatcaccatatggtccgccatttatacctgcttcgccttggccttgatatctaagttgttgaccattgtcgattcccgctggaatatccacttcaatagtattcttacggtcaactgttcctttaccgccacaggttttacatggatactcaataatcacaccacgaccatgacatttgtcacaagtggtttgacgacggatcatgcccaacattgattgttgagtaattgtcatataaccagttccatgacatttatcacaggtaattggatgtgtacctttttcacaaccattaccgccacaagtttcacaagtttcgcttcgagtatagctgacctgggtctttttgcccttaatggcatccataaaatcaattgtcaattgataatccaaatcttggccacgttgtggtgcagttggatcaaccctctgttgacggccttgaccaaaaatatcgccaaagatatcgccaaaatcaccaaagccagaagtatcaaatccggcaccgccaaagccttgaccagctccaccaccaaagccaccttgaccatttacaccagcagaaccaaattgatcatattgcgcacgtttttgcttatcatgcaaaacctcataggcttcgttaacctgcttatacttttcttcagctccaggttcatggtttaaatctgggtgatattttttggctaatttacgatatgccctacttatttcctgatcactggcgtcacgatctacgccaagtactttatagtaatcttcttgtgccatctatttgaactccttgtattctcaaaagaaaagaactactcaatgggtagttcttttctccttttgtttaattataaacccattacttatttggatctactttgtggaattcaccatcttgggcattaccgttgttgccattatttgaattaccaccttgtgggccttgaggacctgcttgtggaccagcttgaccagcagcaccaccattttgttgatacaacttaacagctaagtcttgagcagccttggataaagcatctttcttttctttcatttcatccaagttgttgtccttttgggctttcttcaaagcttcaagagcatcttcaactggcttacgatcgctatcagagagcttatccttagtatctttcaaagtcttatctgtagtaaagattaattgatctacttcgtttctaaggtctgcttcttccttacgcttcttatcttcatcagcgtgttcttcagcatccttttgcatacgtttaatttcttcatctgataaaccggatgaactcttaatagtaatcttttgttccttgccagtacccatatccttagcagatacatttacaataccgttcttatcgatatcgaaggtaacttgaatttgaggaacaccacgtggtgctggtggaatatcagttaactcaaagcggccaagagtcttgtcgtctgcagccattggacgttcaccttgcaatacgtgaacatctacagctggttgattatctgctgcagttgagaagatttgactctttgaagttggaatagtagtgtttctgtcgattaacttagtgaagacaccacccatggtctcaataccaagtgacaatggggtaacatcaagtaaaacaatatccttaacatcacctgagataacaccaccttgaattgctgcacccatagctacagcttcatcagggttaattgaatggtcaggttccttaccagcccattccttaactgccttttgaacagctggaatacgagtagaaccaccatttaaaataaccttgtcaatgtcattaacagtaagacctgcatccttcaatgcattgtcaaatggtaccttagtcttttctaccaagtcagcagttaattcatcaaacttagcacgagttaaatctgcttcaaggtgtaatggaccagcttcgctagcagaaatgaatggaagtgagatgtgagtacttgatacacctgacaagtccttctttgctttttctgcagcatcctttaagcgttgcattgccatcttgtccttcgacaaatcaacaccattttcatccttaaagttcttaattaaccaatccatgatacggtgatcaaagtcatcaccaccaagatgagtatcaccattagttgacaatacttggaagacaccatcacctaattgcaatacagaaacatcaaaagtaccaccaccaaggtcgtatactaagactttttcatcttggtctttatttaaaccgaaggctaatgctgaagcagttggttcgttaataattctttgcacattcaaaccagcaatcttaccagcgtccttagtagcttggcgttgagcatcattgaagtaagcaggaacagtaataacagcatccttaacttcttcacccaagtaatcttctgagaatttcttaatatattgtaaaataaatgctgaaatttcttgtggtgtatattccttatcaccaactttaaccttataatcagcttcacccatgtgacgcttaattgaaacaatggtattagggttggtaatagcttgacgctttgctacctcaccgacttgaacttcaccatctttaaatgcaactactgaaggagtagtccggttaccttctggattagtgataatctttggttctttaccttcaagaactgcaactgctgagttagtagtcccaagatcaatcccaataacttttgacatatattagcttcctctcttattgagcaactacaaccattgctggtcttagtgttctatccttatattgatatcctttttgtaaaacctgaacaacgtgatctttttgatcatcattctcagctgctactgtttgaacagcttgatgtaatgtcggatcaaatttaacgccatcagcctcaatctcaactacaccgtgatctttcattgccttcacaagtgcatccaaggtcatttgcacgcccttctttaactgcttagacacatcatcatcggcctcaacgcttagggctctttccaaattgtccattgctggcaaaatgtccttcgctaagctttgagattcgtacttaattaattgagcacgttctttagtgtagcgattttgcatattttgaatttctgcttcactacgcaaatacttatcttcaagatccttgttcttatcttttaaatcagctaattctttagctaatttttgatcttgtttatttttttcttgcttcttttcttcacctttatcggcttcttttttagccttaggctcagaagtcttttctttttgctctagatttttttcacttggaaattcttctttactcacggctaacctcctttattgaaacttgccataataatcaagcaactttttagctagttcatttctaaaatattcaagcaacccaatcatttgtgaatatggcatattcgttggcccaagtaaagcaatagttcctttaccatgggagccaacgctgtactcagctgtcagcaaactataattttttaataaatcattgggtaattcagatcccaacttaacctttactgaataatttccagactttggatccacctttgcatccattaaattagtgaacagattattatgatcaatcaactcgtacaaagaacgaatgtcatttacatcatgttcagaagtattattgagcaaattaatctgtccatccacatacatctgctcactagctgcatcttttacgacatcttcaactaaactaagcaattcagtcacatgttcgccgcctaattcgtttttagctaattcacttagcaacgaaacgttgatttcatttaggctctttccgactaactgatcattaatcatgcggacagccttttcaatttcttcgccgtgaatattatgtggcaaagcatatacctgattttgaatgttaccatcacttgtaaccaaaattgccataatctgtcgttgagacagcggtacaattctaaatcctgtgactctaacatcatgactctcaggtccttccgcaaatgcggtatagttagttaaatctgacagaattcgtgcagcttcttgtacaatttcatttacttgatgaaaaggtcgatctaattggcttcctattgtattataaacagactctggtaattgcaacggctcaactaaattatcaagataataacgatagccctcgcttgaaggaattcgaccacttgaagagtgagttttttcaattaacccctgctcttccaacacggccatttcatttctaatcgttgcacttgaaactttaattggcaactgcttcattacggtctttgagcctactggctcatgactttgtgtaaagtctgtaattattgtttttaaaataagctcttgacgctcggtcaacatattatatcgccctcacttttagcactcacatctctcaggtgctaacagttaatatgataccagaaattagcactaaatcaagtagattgctaattttattcaaaaaatacgcacttttttcaaagtacgtagcttcttaacccttttgcttaaaataagccctaatttcttgctcatctcgttcaagttgctctttcagttcaggtaatccggcaaattttttctcacctctggtatatttataccatttgatcttcattggcttaccatagacatcttcattaaaatcaaaaatattagattcaatatatatcttcttgtcctgattaatggttacattatagccaacgctagtcatggagttataccacttaccatttactttagtcttggtagcataaactccaattttaggaatcaccttatgttctgcccaaatcaaattagctgttggatagcctagcttatgaccatttcgtttaccatgcccaatgataccactcattacataatggtgccccattaattcagtggctaatttcatctgaccatccttaattgcttgacgaatttcagttgagccaatttttctaccgttaaaagtttgctttggcatcactacaatattaaaacgccctttggaaaattggggtaaattagccatatttgcaatattcttagaaccataagtgtaatcaaagccagcaacaacggtatcagcatttaatctgacaattacattatcgacaaattcttgtgcagaaatttgactgaaatttttagtaaatggtaaaacagccaaataatctactcctaattccgccattttgttagctttttcttccaaagtttctaagtatttaaaatctcgtttcgactcataaacttccttaggatgtcgatcaaaggtcaacacaactaatgacaatttcttctgtaatgcaatttctttagcctgattaattaagcgctgatgtcccaaatgaaccccatcaaaaaagccaagggcaagcacaattctagtagataaaatattttccttaacaggatatgttaaatgaacgattttcacagctaattccttcatttcatttattcattttgcaacagcattaagcttgggcgataaagctttccttttttttcataaattgctttcacctttttattgtatcgtagtgcaacttttttcgcattagtttcaagcgaaatacccgctccatttttaactttaagccacttttcttcagttaaatcaacctgagtgtattccttaaaaaatgcatcaatcggctgtataagttcagtggcctttttcggattctcttcaatctcctttaattttactgcttgtgtaatatcaaagccagaactagctgttcttctcaaataagtcatcgttgcggggcaatctaatttttcacctagatcattaactaacgatctaacataagtgcctttgctgcatttaatcttaaaatcaaagctttcttgcccagtatttatatcaaaaactggttctttagttagatcatattgtttgacttcaacctttctctgaggtcgctcgacttcaatctcttcacgcgcatattcataaagatgtttaccattcactttaacagcagaataaattggaggcacttgaacaatttctcctacaaatttattcatattttcttgaatttctgcaccagaaaaaggctgaatcaactttttttcttttaaaacagttccagttgcatcataactatctgtgctataaccaaatagtcccgtgccaatatattcttttggcctagtatgcatcatttcaattaatttagtagcctgaccaatagcaattggtaaaacgcctgtcacctcaggatcaagcgtaccagcatgtcctatttttctaatatgtaatacgcggcgcaaatgataaactacatctgcactagtcatccctttatctttatcaataactaaaattccgtttaacataattattccctattcttttcaacaaaaaaagggcaccatcacggcgccctcttttttatttgctttcccgcttagcatcttgtttcttaacttctgcaatcaaacggtcaatcttactaccatacaaaactgaattatcacgtttaaaaattaattcaggaaccttataaacagttaatgtttgaccaagcaaatgacgcatcatgccttttgccttttcaaaacctgcctgaacctcttcttccttatgctcatcttcagttagcaggctgtaataaacagttgcatatgaaagatcattcgtacattcaactgcggtaatagttacaccacttaagcgcggatcacgaatattcttttgtaaaatcttggttaattcgcgtagaatttcaccttcaacacgaccaattctatgcttcatgttttcctcctaatagtaattacttaggctcaacttgttgcatttcgtaaacttcgaattcgtcgccaactttaatgtcgttgtagtccttaatcgttaaaccacaatcgttaccttgcttaacttccttaacatcatctttaaatctcttaagtgaagcaatttcaccatcatacttaacgataccatcacgaataactctaatcttagaatcattcttaaccaagcccttatcaacgaaggaaccagcaattgtaccaaccttagaaaccttccaagtttcacgaacagtaagattaccgataaccttttcttcataagttggttcaagcatacccttcatggcagcagtaacatcatcaatagccttgtaaataatgctgtaaagacgaatatctacgccatcggtttcagcttggctcttagcagtagcagttggacgaacgttgaacccaataataaatgcatttgatgcaccagccaaagttacatctgattcattaatggcacctacacctgagtgaatgatatttacacgtacgccttcaacttcaatcttttcaagcgattgttgtaaagcttctacagaaccttgaacatcagccttcaagacaatgtcaacttccttcatgttttccttcttcatagtatcgaagaggttatcaagagttacgtgttgaacattttcacgagacttttgtaaagcttgttgtgctctagcttcaccaacacttctagcggtcttttcatccttaaattcaactaacttatcagcagattcaggcacatcgttcaaaccagtaatttcaacaggttctgatggtgtagccttcttaacttgacgtccacgatcattagtcatagtacgaacacgaccaaaagtgttaccaacaacaatcgggtcaccaacattaagtgtaccttgttggattaaaacgtctgctacaggtccacgaccacgtgacaaacgagcttcaatcacagtaccaattgccatttcagttggattagccttaagttccatcacatcagattgcaacaagatcatttgtaataagtcatcaacattttgacctgtcttagctgaaatattaacgaagatagtatcaccaccgtaatcttcaggaatcaaattgtatttcattaattcctcagttacgtgttgtggatttgcacctggcttatccatcttgttaattgctacaattattggaacattagcactctttgcatggtcaattgcttctacagtttgtggcattacaccatcatctgcagcaacaaccagtacaacaatatcagtaatttcagcaccacgtgcacgcatgttagaaaatgctgcgtgtcctggtgtatccaagaatgtaattaagcgatcatctaatctaacttggtaagcaccaatcttttgagtaataccaccagcttcatgagctgaaacatgagtatgacgaagacgatcaagtaaagtggtcttaccatggtcaacgtgtcccatgattgtaacaactggtgggcgtttaacctggtttttagattcctttgactcttccattctcttgtcatagatattatcaatatcagagatgtcttcatgaactttttgctcagcattgataccatattcagcagctaaaagttcaattgtatctttatccaaagattggttttggttagtcatcacgccaagcatgaagagtttcttaacaatttcagctggttcacggtgaattaacttaccaatatcttgagcgttcataccttcttcgtaaactaatgtttctggtaatggacgttccttacgcttagtaagtgttttctttggcttttgctcttgttgacgttttttattcttacgccgctttctctctgaacgatctgaatggtcactacgaccattgccaaattgatttttacccttgcgtcctggctttcccatgttgcgaccacgattattgccgcgtttttcttccttaggagcctcaggaatagtaacttgaactagttctttagtcgcttcaggctgttgcttcttcaaacgagctggagaaggctttaaaatcttaggaccaataactttcttttctactggttctgctttcttcttgttatctttgtggttgcttgttttcttattatctttcactggctgttcttgttttggatgtcttaattgctcatgatattcttttctggctttttgggcttcacgattaagttgcccttcttctgcccgttgcttttgtttaaattgttgtaacaaagcagctgcctttggcttacctgtattatttctacgatcatttttattctcatgaccgtgattatttgaacgacgtttattattgcgtctcttagaattcttagaactattattatcttcttgcttcttttcatttttgcgaatagaagaaacagagatttttattttattctttttattagaagattttgcagcaggagcggagttttggaaactattctttaactttgcaacctgtgaatcatctactgatgacatgtgattctttacatctaagcctaaatcctttgctttttggactacaactttgttatcaacgccgacttcttttgcgatttcataaattcttttctttgccatccaatcacactccttcatttatttttttaactaacgccttagcaaaaccagcatcagttaatcctaaaactttgcgttttttgccaattgcctttgacaattcaatggcagtaaacatagttatcataggaatattgtcttttctggcagcgcggtttactttttctgccgtgttgtcttgaacatcactagccataataaccgctttgattttgtgcttattaagttcattaatgactgtctctgtaccggtagttaacttaccagcacgctcagctaaacctaacaaattaattgctttttgtctattttgcaatcttatttatcaccaaataattcttttcttgccttttgatgatcaacataagagtaaagctcatcgtaaaaagtatctggaactttcgcacctaaactacgttctaatacattcttctctttagcagcttcaatcttacttggatcaagggaaacatatgcgccgcgaccagcctttttacctgttggatcaactgacacatttttttctttatcgataacaatacgtactaattccttcttgggctgcattgtatcggttaataaatccttccgcattgggatttttctttttttcaaaaaatcacctattcttcagttttatcttctttacttgaatcttctacagtagttgtatcatctgagctttcaacgtcagcagcgtcatctgtactttcaacattttcagaagtttcgctactatctgcagcatcagctgtatcatttgttttttcatctacaaattctacttcagattcaggacgaatatcaatcttatagcttgtcaaacgagcagctaagcgaacgttctgacctttcttaccaattgcaagtgataactggtaatctggtacgataactaaagcacttttttcttcttcatcatcaccaaattgaaccgcaatcacttctgctggatttaatgcattagcaataaagtcagatggatcttcttcatacttaacgatatcaatattttcaccgccaagttcgttaactacattttgtacacgagcacccttttggcctacacaggtacctaccggatcgatgttaggatcatttgacttaacagccatcttagttctgtcacctgcttcacgtgcgattgaaacaatttcaacggttccatcataaatttctggaacttcttgttcaaacaatcgtttaaccatgtcaggagcagttcttgagactgtaatttgtgcacccttgctatcggagccaacatgagttactagtacacgaatctggtcttggggattgtaaacctcatttggcatttgatcacggtgaggcataacagcttcaacattaccaatctttacataaacgaaacgattgtcgcgtctttccacggtaccagtaaccaattcatcttcatattgtgaatattcatcaataatatgttttctttcggcttcacgtagacgttgcatgataacttgcttagcagtttgggcggcaattctaccaaaatttttaggtgttacttcaaaacgaatttcgtcgcctacttcataagcacgattaattgttaaagcatcctttaaactaacttcaagacggtcatcttgcacttcgtcaacaacagttttaactgccattaccttgaagttaccttttctttcatcaaaatcaacttcaacgttttgtgcttgattataattctttttgtatgcagctaccaaagcggctttaattgcatcaacaataatatcttgcttaatgcccttggtattttccaaagtagcaaacgcttctagcatttctttagacataagtttttgatcaacctttctaaaattcaattgcaaaacgaatatttgcaattaacttacggggaacagttaatgtttttcgtcttgtcttatcttttatttctaatacaacttcgtcatcattataagacttgagtgtaccttcatacatttttttattctcaatcttttgataaagaccgacatgaatgtaatcattcagagctttttcccaatcagcttttgttttgattggtcgttctgcccctggagatgataattccaaaacatagggatctggaagtggatcgggatcaagagcatccagcttttcggaaacaagttcacttaaagctgcaatctcatcaatgtcaataccgtttggttggcgatcaacataaatgcgtaaataattttgccctttttctttaacgtattccatatcaaccaacatgtcaccatgttcatcaataattgtttcgacaactggacgaacagaatctataactttagacaaaaattttcctccgtaataaaaagagtgagcatcactgctcactcgaatttacctattcgaacttcatacgtagtataccatgttttacctgatcttgtaaaatttaactatcagaaaagtgataattgattttcatctggcatcccttccaagacaccattttcttcgaaataattcataattgtttgtgatactttaccgcgcttagctaaatcttctttagacaaaaacttcttttctgcacgagcagctacaatctgcttagctgcattatcccccaaaccaggaacagcattgaacggtgctaaaattgtatgcttatctaagatcttaaagtcagttgcttcagattgatcaatatcaaccattttgatcttaatccctcgttctagacattcattagctatttctagcacggtcatcaaactcttatccttagctgatgcatcgtttcctttatcctgaatttccttcattgcagccttaacagtattcttaccatgactcattgcaaccaaatcaaatagatcggcacgaactgaaaagtaagctgtgtaatagatttcaggataatatactttaaaccaagcaattcgtagagccattaaaatgtaagccgtagcgtgagccttagggaacatgtacttgatcttcagacaagaaggaatataccaatctggaatattcttatttttctttaaaatagccatattttcatcgctgatgccacgaccatgacgaacggattccattgttgaaaaggcaacttctggcttaacgccccagtgaattaagtccatcatgatgttgtcacgacaaccaattacatttttcagtttgcaaattccttgattgattaagtcctcagcatttcctagccatacatcagtcccatgggacaaacctgaaatctgtaataattcagaaaatgtcgttggcttagtctcctcaagcattcctctaacaaaacgggtaccaaattctggaacacccaaagttccagtttctgattgaatctgctctggagtaacacctaaaatatcaggactagaaaataatgacatgactccagggtcatcgggtggaatagtcaatggatcaatcccagacaaatcctgcaagtgacgaatcatagttggatcatcatgtcccagaatatcaaacttcaaaatattatcatgaatagagtggaagtcatagtgagtaatcaaccaagcggcatttacatcatcggctggatacgataccggcgtaaaatcgtaaatgtccatatcatcgggcactacaacaattcctgcagggtgttgaccagtagttcttttgacaccacggacaccagctgccaaacggtctaattccgcatttcttagctttaaatcatgctcttcatcgtagtgtttagcataaccgtaagcagtcttatccgcaacagtcgcaatcgttccagcacgatatgaattatctggtccaaacattactcgaataaaattatgggctactggttgatagtcacctgagaagttcaaatcgatatcaggaaccttatcgccgtgaaatcctaagaaagtcgcaaatgggatatcttgtccatctttaactaatggagttccacattttggacaatctttatcaggcaagtcaaaaccagaaccatattccccattttcaaagaattgtgaatacttacagttaggacaacgatagtgtggagctaacggattaacttcagtaattcctgacatcgttgctactagactagagccaacagaaccacgagaacctaccaaatagccatctttatttgacttagctactaaacgctgagaaatcaagtaaataaccgcataaccattcgaaataatggaatttaattccaaatctattcgatccttaacaatcttcggtaatggcttaccatataattcataagccttatcataggtcaacttcttcatttcttcatcggcatgttcaatatgtggtgggtataacccatctttaattggctgaatttctgacaattcatcagcaattttattggtattgtcaataacaattttcttagccacatcttcgcctaagaatgaaaatgcatctagcatttcctgtgttgaatagaaatgcaaatctggctgtggcttatttcgactagggtttgatctctgagccgcaatcaagattttacgataaatagcgtccttttggtcaacgtagtgggcatcgctagttgcaactacaggcttatttaattccttccctaatttaataatattttcaataatttcatgtaattgatcttcatccttaatcaaaccatcagcaattaattgcgaataggttgctggaggttgaacttcaagataatcataaaatttagctttttctcttgcttcgtcgtaacctttttgcatcattgcgataaagacatcgccttgccaacaaccagaaccataaagtaaaccatcatgcaaacgagccaaatctgacttcggcgtacgaggaatacggaaaaagtccttcgtgctggcaattgatactaatttgtaaagattctttaatccagcttgatcctttgccaaaactgtcatatgggaaggacgggctcgtttataaacttcaccatgtgctgcatagccattcaaattattcaaattattttcatgatactttttattaaaagcatctaacaatttaaacattaaatagccagttgcttcagcatcctgatttgcccggtgatggtgttccaaggaaacattatacttcttagctaatgaatctaaagtatggcgactctgctctggatgtagtaaacgcgatacttcaagtgtatcaactactggctgagtaatttcttttagccctgcacgtcttaatgctgcattaacaaacccaacatcaaattgaacgttatgtccacacagtggtcgatcgccataaaagtcttggaattgcttaatgacaactgcttcatcatcggctgcgccaaccatttcatctgtaattgaagtcaaattaatagtttgctcacttaaaggatggtgcggattaatgaacttatcaaagcgttcaagcacttctccgttcttcatcttaaccgcaccaatctcgataattgtgtcgtaaacagatgacaaccccgtagtttcaacgtcaaaaattacaaactcgcggtcttcataggtcatcggtgcaggattcaaaactagtaaagcatgatcatcaatcatattagcttctacaccatacaatattttcatgtccagtgctttaccactgctatatgcttcagggaatgattgaacatcaccatgatcggtaatcgcaattgccttttgtccaaacttcttagcagttttaataaagtccgtcggagtattagttgcgtcaacctgactcatattagtatgaacatgtagttcaactcgtttaggctcaccttcgtatttttcagttcgcccaacatgctcgacagtctctaagctactaatattaaaaactacatcatgtatatattgatcatcagcaactgacccctgcattttagcccaagttcctggtttaattgcagatagctcttcaatttcatctttattagaaacaaatttcttaaatgcaattgaatcactataatccgtaatttcgccagaaaaaatgattgcaccagatttaagctcacgagtttcaacattaaaaatatttccctcaattactacattacgtacgccatcttccagctctttaatttgtgtaattggagcattttcatctaatttacgtttaccataattagtacgtctagttggatactgtttaggttgttgcggtttaggtttgtctggcgtcttctcaaagacttcctgcatgcttttttcatgctcttgttgcaactcctgcaaactttctaaattgtttttagaacttgtctgatccagctgagttataaatttcaaattaaagaagccataatcacgcatcttttcagctaaatcatctaaagccttctgctcaattaaaccatcaatcacattattatcaactggaataacccagcggccatcaacttttttaggtttttggccagccaaaaattcacgagccacaggttgcaaaatatttgaattttgaactacataatgccaataatctggtaaatattgatcagaaccatcagctgttccaacataaaatcttacatttacaaaagaagaaaaagtttcttctacagcttttcttaatgctacataggtgtcatacatcaagggagtatcaaaaaaaacgtggatatcccacctgtgttctttagcgtaaacatccacgttttcaattttccctttttgtagaagcgcattgtcttcaaaactatcaggaaattgaacctgtttgagcaattttaagaaaagatcgtttttatttgccacaaaaattatcctaactcttgatttacaaacttatctaattcatcaattgacatttcggttgctttgtcatcagttggtcgcttaacttcaacaatgccatcagcagccttcttaccaatcgtaattctaattggtgcaccgactaaatctgcatcagcaaacttaacaccagcacgctctttacgatcatcgtataaaacatcatacttttcactgaatttcttttcaagtttttcagctaattcagtttgatcttctttattcatcttcatttgaacaatatgtattgcaaatggagcgatttcctttggccatgcaacaccacgttcagttaagtgttgttcaacagctgctgataacattctagtaacgccaataccgtatgaacccatgatgacaggctttgctttaccattttgatctaagaaatctgcacccatggtcttagtgtaataagtacccaacttgaaaatgtgaccaacttcaattgaagtagtgaacttaagcggtaaatgatcaacaggatctggttcaccttcgttagcagtccgaatatcagcaaattcatccaccttgaaatcacggtctaagttagcattttcaaattgataatcggtttcacctgcaccaactacaacgttgtaaagattcttaacagtttcatctgcaataatcttatcagcccaatctgcattaacaggaccaacgccacccttttcactaccagtgatttcctttaaatcagcagtatttgcttcatgaacctcatcagcgtcaaggatatgacccaacttaacctcattaatttgcttgtcaccacggattaatactaaaactttttggtcatcagcaatgtataaaatacttttaacaattctagtagctggtacatcgaggaatttagctaatttttcaattgtatcgcagcctggcgtagctaccttagttaattgcttagcatcttctggttcttgcttgaaagtatcaatactcttagccatttcaaggttggcagcatatgttcctttttcattagtagcaattgtatcctcaccgatagcagcaggggcttgaaattcagtagagtttttacctcccattgtacctgagtcagcaattacagggtgaacagtaacaccggcacgtttaaagatacgcttatatgcatttttttgatcatcaaattgttcatccaattgatcacgagttgcagcaaaactgtaaccatcaagcattacaaattcacgcccacgaagaaggccaaaacgaggtctattctcatcacgaaacttagtctgaatttgatacaaagcaagtggcatttgtttgtaactctttaagttcttagcaataatttcggtaaaagtttcttcatgtgtaggtccaagcaagctttcacgtccatgacgatcttttaacttgaacatttctgcaccatatttcttgtaacggccactttcttgccacaaagttgcaggaagtaaatgaggcataatcatttctggaacattaattttatccatttcttgttcaatgattccctcagccttgcgtaaaacacggtagcctaatggaagataagcataaactccagctgtgacttgacgaatatacccacctctaatcatcagcttatgactttcagccactgcatctgatggtgcttccttcaaagttggcataaaaaattttgattgacgcattcttatctcctaaagtaaaaaatataattatttaataaaatagcgatagatatcgttacctgtaactgcaataattaaaactaataataagccgaaaccaattaattcaacaattgcctcatgttcttcagaaatcggtttaccgcgaactaattcaattaagttcaataaaagtttaccaccatcaagcccaggaattggaattaaattgacaattcccaaattaatcgaaatcattcctaaaaaggctaatacataagtaaagcccatttgtgaaacttgtgaagtttgagaataaattccaactggacctgataatttattcaaactaaagtggctaaataagttacctacggctctgaaaatcagaccggtagttgaaatagctgtatcccagccacgttttaatttaacaactgcattctcattgctcttagctacaataccaatttgataaactgtttgtttttgaattttatgagcttttggcttaactgtaactttcctaatttgaccatttttctttaattcaaagtgtaagaccttgcctttactttgattaatctgctgtgacacttgatcaaaattattaatcttttgtccattaattgccacaatctgatcaccagtcacaatttttgcatcacgcgctggtgaattagcctgagttgatccaactgtagttgttgctggacctggaactgtaaatgtccagattaaaaatactacaaacccaagaagaatgttcataaaaggtccagcaaaattagttgccaacttttgccaaacattagcttgattaaattgtgtatctcgaggcgcaataattaattcagttccgtttttttcaataatagttgcatcatgagctacgtgataagttactggatcattttcatcgccattttcgtaacccttaattattaaatcgtctactagatcagcctttgttacttgaacgggaattccttcaattggtatttcgctttctgaagcatcaattctcactacttcattttgttcattcaattgtaaaacaaccgtcataccaggatccagcttgctttcatcgtcagcgcctgctaaacgaacatacccaccaagtggtaaccaacgaatggtataagtggtggggttacgtctaatttgaaaaagctttggacccattccaattgagaattctctaaccaaaatacctgactttttggctacgataaaatgcccaaattcatggacaaataccaatataccaaagacgacgataaagattagtatacccttcaataaaaaattctcctaatgaacaatacctaaaattgtagccactactggcaatacaaacagcatactatcaaagcgatccaggataccaccatgacccggcaaaatctttccggaatctttcacaccatagaaacgcttgtaagctgattcaactaaatcacccatttgaccaacaattgataagaaaaaggccagaataatcatcgttaattcagatacaccaaagttaatacccaagctgccaagaattgccatatagatggcactacaaattaaggcacaaacaactgcaccgatcgagccctcccatgttttattaggactaataactggccataatttatgttttccaatcttacgtccaatcatgtaggcaccgatatcagtggaccaaacaacaacaaaaacacaacccagcaatgctaaaccgttttgtgggtatgctctaatggctgccatatagtgaaaacctattccaatgtaaagtgcagccaaaatatatacacctacatcatcaaaagtggttttattctttgaaagaacagtccaggtcaagaacaacataataattccataaaacacacctaatttagtgatatttgaaggaaatactttaaagaatgagtctggaactgtccaggttaaagttgcaagtaaggctaacaaaaaattaaaagaaactaagatttgtttcttcattaaaaagatttcgctaatgccaactgctgcgaataatacagtcagccaatccatccaaaggccacctgcgagcacaattggaataaaaagacataaggcaataattgccgtaattgtacgttgtttcatatttaactatccgattcgtctactttaccaaagcgccggttacggtgcttataatcttctacaaatttttttaaatcattttcatcaaaatctggccaatttttttcgctaaaggcaagttctgaatatgctaattgccataataagaaattagaaattcgctgttcaccggacgttctaattaataaatccggatcttgatatggaccaaagtttttagtcatcaaatggtctgaaatcattttttcagtaatttcttcgctttttagtgaaccagcttcaatcattccaccgagctcctgcatagcagacgtaatttctcttcttgacccgtagttaaaagcaaaattcagaattaagcctgtattattggccgtctctgacattgcacgttgaacaatgcgataagtcttttcaggcaattcatccaaatagcccatgatatttaccttaacattattttccatcaatgttggcatgtatttatcaaaaaagcgaacagggaggttcattaagtaagctacttcttctttaggacgagcccaattctcagtagaaaaagcataaagtgtcaaaactttaattcctaatttatcagcagctaaagtaatccgctcaacattatccattccctctcgatggccaacaaaacgaggtctatgcctcttttttgcccaacgtccattaccatccataataatggctaaatgatttaattcattatccttattactcatctttaaccttgagtaatttccttacgcttttcatcagcaagttggtcaatctgcttagcagcatcatcagttactttttgtacttgcttttctaagttacgttgttcgtcttcagtaatatcaccattcttttcatcttttttcaaagtattcatggcatcacggcgaacatttctcacagcaattttagcttcttccgcaaattttccaacttctttggcaatttcttctcttctttcaccagtgagttgagggattactaatctaattaccttaccatcatttgccggagttaatcctaagtttgaagccaacaatgcatgttcaatatcatctaatgaattttgatcatatggagtaataagcaatacacgtggttcaggaatggtaatactagacatttgagtcaatggagttggtgccccatagtattctacttggacattatcaagaagagcagcgttagcaacacctgcacggatagaagctaatctcttttgataaaccttaatagaatccgtcattttagtttttgctttttcaatagtttcgttattcattatttatcacctctaataacagtaccaatattttcacccaatacaaccttcttgatattgcctggagtattaacgttaaagacaattaatggaatttcagtatccattgaaagtgaacttgcagttctatccatgaccttcaagtcttttgaaattaaatcaagttgagttaattctgagaacttagttgctgaaggatcagtctttggatcagctgagtaaacaccgtcaacaccgtttttagccatcaaaattacatcagcaccaatttcagctgcacgaagggctgcagtagtatcagttgagaagtatggattaccagtaccaccaccaaaaatgactacacgacccttttcaaggtgacgcaaagctcttcttctaatgtaaggctccgcaatctgtctcatttcaattgaagtttgcattctagtaggaacacctattttttcaagaccatcttgcaaagctaaaccattcatgatagttgctaacatacccatgtaatctgcttgagcacgttccatacccaacttagcgccagtttcaccacgccacatgttaccgccaccacagacgataccaatttcaacacctaaatcatgaactgatttgatttctttagctaagtgaccaattacagtaggattaatccccgtacccttgtcacctgctaaagcttcacctgatatttttaaaatgacacgtttatatttaacttgactcataatgacctcctctaatagctttaattattctaccatatctaatgccgcaatgtcttttaacacttaaaacactacaaaatttttacaaaaaaagaaggagcacacggtgtactcctcctttctatgataattatgtaataatgactacttcatttgttcacgaacttcagcagcgaagtcttcttgcttcttttcgataccttcgccaacttcgtaacgttggaaagcaactaacttagcgcctttttccttcaaaaattcgccaacagtcttgctatcgtccataatgtagtcttgtgataacactgcaaattgcttgtcaacttgagtattatcatcaataaagcgttgcatcttaccaggaataattctgtcccaaatcttttctggcttaccttcttctttaagttcagccttgatgtcttccttagccttagccaaaacatcatcagttaattgcttagctgaaccgtaaacaaggtgaggtaatggtttcttatgtaccaatgcacgactttcattgtcttggtcaatcttgtggttcatcacagctaattgatcagtgataaattgatcatctaattcgtctggtgaaataaccttagggctcatagcagcgatgtgcatagccaagtgcttagcagttgcagcatctgcaccttctaaaacagtgataacaccaatttggccaccattgtgttggtaagcaccaaattcttggtcgtcattcttttcttctaaagcaaaacgacgtaaaacaatcttttcaccaattgtagcagttgcgttaacgaatgattggtctaaagtagtaccatcagccatcttcaattccttagctgcttccatatcagctggcttaccttcagcaatagtcttagtagcttcatttaccaagttaacaaacttgtcgttttgagaaacaaagtcagtttctgagttaacttcagtaatagctgccacattaccattaacgtaaacgccagttaaaccttcagctgcaacacggtcagccttcttagctgccttagccatacctttatcacgaaggtattgaacagccttatccatgtcaccgtcaacttctactaatgccttcttagcgtccataacgccagcaccagtacgttcacgtaattctttaactaattttgcagtaatttgtgccattaatagatcctcctacggaactaatagtaaaatctagtcttctgggttttcttcagcgctaacgatttcttctgaaccgtctgcattttccttgaagtcaacttcaactgattcatcatcttgaccttgttgaccttcaacaacagcatcagccatagcaccagcaatcaaacgaatagcacgaatagcgtcatcgtttgatggaataactacgtcgattgggtctggatcagtgttggtatcaaccatagctacaactgggatacccaaaatgttagcttcgtgaacagcaatcttttctttcttagggtctactacgaacaatacatctggaattcttggcatatcttcaataccaccaaagaatttttcaagcttgtccatttccttagttaagagagcaacttccttctttggaagaacatcaaaagtaccatcttctgacatttgctttaattgctttaatctcttaatacggctttgcatagttgaccagttagtcaaagtaccacccaaccaacgttggtttacgtagtattgacctgcacgagttgcttcttcagcaattgaatcttgagcttgcttcttagtacctacaaataagaaaacgccaccgtcttgggcaacagccttcataaagttgtaagcatcatctaacatcttgatagtcttttgcaaatcaatgatgtagataccatttctttgagtgaaaatgtaaggagccatctttgggttccatcttctagtttggtgaccaaagtggacaccagcttcaagcaattgcttcattgtaacaacgtctgccatatttaaattcctcctatggttttatatcctctcaagcgttcatttcatcatctaaccactaccctgggcaccacgatgatgattgctcttgatgtgttttaagtttcatatgctgacacagcatactcaaatattctacaagaaaagattacagtatgcaaggattaaaactttatattatgctcatgcaaaaatttttccttccaagcacgtgaatgatgtttaaaccaatattctcgtttcaaagctaaacgcttatcgtcaaactgttcatgataaatcatccgtacaggacgccgtgttttagtatacttagctccttttcctaaattgtgcattttcaaacgatgttctaaatcattagtaaaaccaccataaaaactgccatcattacacagtaagacataaaagtaatatttaccctgtgcttcatgtttagctttgtcatctgcagtttctcgtgagattcgctgtactaatggagtgaagtcgccatttgattcatgaacttcaacagcatctttcaaaacagttccatcagttccagtatgcttgacggcttctacaataattaaattagcatcttcaccgcgatgtggcacaaatggctgcaccattttgatgcttaagtcatgcttcatacaataataagcaatctcacctaagcgctctggccgatgtaccattaacattttgcctttcattttaagtaagccactagccacttcaattatttgctctaaattaatcaaaagttcatggcgagcaattgcttttttacgatctggattaacttcatgtcccttaggtgctttaaaatatggtggattaactgttactacatcataactatctttccgcaaaaaatgtcctgcatttagcacattatcctgaaaaactgaaatacgattttccatctcattaagcttgactgaacgaactgcttgagaataaacttcgttttgaatttcaattgcatcataatgggcacgattaaaataagccatatagattgtagctgcacaatttcctgcacataaatcagcaaccttatctttatcacggatcaagtctttagcccaatatgctaaaaataatgtatccattgaaaaactaaaagccgttttatcttgaataatacgaagattatcgctatacatgtagtcaattcgctcattatctttcagatctaccataaaaatatttgcctttctcgtcattatatttttataatagcttacatcaaatgaaggaatcaatgaggagacaatgttttacaaaattatacgtccgattgtccgtttcatcgtttgggtgttaaacggtcatctacacattcatcataaggatcgcttgcctcagggcaattatattttagtagccccccaccgtacatggtgggaaccactgctttttgcactaggtgctagtccaatggaattcatgtttatggctaaaattgaattattcaaaaatccggttttacgatttattcttgatcatgctcacgctttcccagtcgatcgaaataaccctggaccatcagccttaaagattccagttaagggacttagagaaggaaagttatcattaattatctttccttcaggcacgcgacattcagctgaattaaaaggtggagttttattaatttccaaaatgtcaaaaaaaccaatggtacctgttgtctaccaaggccctttaacttttaaaggactgcttaagcgcaagccattagaagttaactttggtgatccaattaccattgatcgtaaaactaaactaacccatgaaaatgaacaaattttatttcaacaacttgaagatgcttggaacaaattagataaggaaatggatccaaatttccactacgttgctaaataagtaaaaatcagtataaaacaaatattgctttatactgatttttctttacctgtgcaatttaatataagtgttaaaataatttttaggttttaaatattggaggaaaaagcaattgttagaaaaaactttttacaaaatgatgcttagtaaatctttccccttttctgttaaggtaacctactgggacggtaagagcgaagtttatggcaatggtgatcctgaaattgaaattgtttttaatgaaaagattccaatgagtgaaatcactcgaaatgcttctctagctttgggcgaaggattcatggataaaaaaatcgaaattcatggtaatatccaaaaattgcttgttggtgcttatgaaagtgctgattcattcatgcgtgcttctaagttccgtaagtttatgcctaagcaaaaacacacggaaaagcaaagcgaagaagatattcaaagccactacgacattggtaatgatttctacaagatgtggcttgacccaacaatgacctattcctgcgcccacttcgaagatggcaataaagatgatcttgaacaagctcaaattgcaaaagtacatcatatcttaaacaaactccacccacaaaaaggcaagaccctacttgatatcggatgtggctggggaactctgatgcttactgcagctaaggaatacggtttaaaagtcaccggtgttaccttaagtgaggagcaatttaaattagttcaaaagcgaatctacgacgataacttacaagatgtcgcaaaagttagattacaagaccaccgtgaacttggtgatcaaaaatgggattacattacttcagtgggaatgtttgaacatgttggtaaagaaaacttacctaaatactttgctgatgtctacaagtaccttaacaaagacggtgttgcattaatccatggtattacccgtcaacaaggtggtgccactaatgcttggttaaacaagtatattttccctggtggctacttaccaggcttaccagaaattgttactgacatcatcgattcaggcctacaaattactgatatggaaactcttcgtcgtcattatcaaagaaccttggaaatttgggataagaactttaatgccgttcgtcctgaagtagaaaagaaatttggtgaaagattctgtagaatgtgggatatgtaccttaatgcttgtgctgctagtttcgagtctggtaacatcgacgttatccaatacctattgacaaagggaccatcaggtaaaactttaccgatgactcgtaaatatatgcttgataaataattacatatcaaaaatagtcactagaaattgaaatccagtgactatttttttattcaattttaccaaatagtaatccgttcttctggatcaagccacatgccatcagttggcttaacgttaaatacatcatagaatgcattttgacattgaaccggaatgtttactctcgttggttgtggcgcatggacatccgtttgaacttcagtcttaattgcctcagggcgttgtttctgcatccagctacgagcataattctcaaacaaatctttcaaatccgccccatcattttccccagtttgaactacacaagcaaggccagctagatcagcaatattttcaccaacaacctgcttaccattaatcttagcaggaccatattgtaagccatcaaaaatatcaaccatttgaccaactcgtttattaaactcagcaaaatctttgtcagtccaccaattgttcatatttccatgttcgtcgaattttgctccactattatcaaatgcatgtgatacttcatgcccaatagttgcaccaattccaccataatttgcaccacgagattgattaatgtcataaaatggtgcctgtaaaattccagctggaaaggttaagtcatttctttgcggatcatagcacgcattattcaaattacctggcattagccaaactgaacggtcaactggcttagttaacttattaagcatatatttcgttcgtacagttgacattgccgcttcattttcatacaagctctttttcggatcaacttgtaataagtcaaagatttcttcgatcttgtctgggtaaccaatttttaaaaccaacgcctttaacttaatcacagctttctttttggtttcagcagaaagccatttattagcattaattctttcttcatataccttaagcatccgttggatcatgtcttcaacatcttttttggcttttgccccaaaatatttttgtccataaaagataccaactacttcatcaaaagcaccattagccaaacgataagcttgcttaatttgtgatggcaattgtggcgtaccagtaactgcttgaccaaaaggaaacgcagcttcacgaaaatcttgtgacaataatttagctacgctgttaatgtatttaactagcatccatcctttaatctcagcaaaattcccttcattcaataattcttcagcatgattgagaaaacgtggttccataacgataattcgatctggcttaaccggtaaaatagaatccatgaaatcagccatgtcaaatgatttaaattttttaataaagtcagcatatgttactggattataaattgcggcataatctgaccattcctcagttgacttaactaccttagctaatttttgatcaaaggccaaagcgctttcaacataaactcgtgcttcgcttttaccaataccggacattgtcagtaagttaatactttggtcttgaagagtatccaaaagttgcttagcatcagcagtttgatacgtcgtagtatctggtaagaatgtgcttgggccaccaaaatggagtacgtttacatcagtgttcttcatatcggcatcgacgtcaaatacaaacggtaaagcatatggtcccataaacaaatcggcagctttttgtttaaaatcattaaaattatttaaggatattaatttttgtaaatccttttgaataggattagctttttctgcatccctcttagcaaaatcttttgcaatcttatacaaaataactgccttatcaaagtctttaatctcaggcatcttttctttgcccgccgcaatgtccgcaaagtctttcattactcgatcttcgattttttggtcaagctctgaattgacaccagcagatgtcttatcagcaggaatttctgctttagatagccattctgagttaacagccaagtataagttatcttgtggcttagcatttaagtctggcttagaaacgtcgccagctccaccacgaactgtaaaatatcttttcatttttgctccttataaatattcataattatttaatactttttaactattatatcaaaaaaagacgttgctactacacaaacgtcctgaaaaacaattagtttttattttcattattttgcaaggtatacaaattatagtaataacccttttgtgcaagcaattgatcatgcgtaccccgttcaattatgcgtcccttgtctaaaacaataatttgatccgcatcggcaatcgtagaaagacggtgagcaatagctaatgtcgttcgaccctttctcagccgctttagtccttgctgaatcaaagtttcagtctcggtatcaacatttgctgttgcctcatctaaaaccaaaatcttaggatctgtgactaaagttcgagcgaaagaaattaactgtctttgtccctgactaaattcttctccgccttcaatcactttagcatgatacttacccggcattctttcaataaagcgatccgcttggactgccttagcggcgtctttaatctgattatcagtaatttgattattatacaaacgaatgttagatgaaatatctccataaaacataaacggttcttgcaataccaagccaagtttttttcttaattcttctttaggatatttacgaatattaacgtcatcaatcaagatttcaccttgaccgaattcgtaaaaacgcatcatcacgttaataatcgagctcttccctgacccagtatgaccaacaattcctaaagtttcacctggattaactacgaaagaaatatcatgtaaaatttcatgcttgccatcataagaaaagcttacatgtttaaactcaatttttcctttagtaatcgtcaatcctttttgagcatcctgctgtggttcatattgggtatcatcaagaatccgaaaaatccgctttcctgcaacaatcccatcttggaaaaaggtcatttgatccatcacagttgaaataggattaaaaagttgcgaaatgtattgtgaaaaggcatagactacaccagctggaacaaaagtttcacgtaatggaaaaccaaagtacattaatgaaatggctaaagctaacgaataaagcagcgatgtcaatggcgataataacaatgaatttactcggatcatgttgaagcgtgtattcattaaaccaccattttcgccttcaaaattattagtcatccgtttttcttgattaaattcttggataaccgatactccttcaattgattcatttaagttagcgttaattcgactaagacgctcacgataattacgataaagacgtgagcttttttgcgaataaagccaaacaactaataataaaatcggaataaagagtaaaatcaaccacccagcaactatattagtagtaaacatcgctactaacgcagtaatcaccgaaaaagcaccaatcacaaaagttgatagcaccgtcaaaaaattactcaaagtcatcgtatcattagtaactctagaaacaattgagcccgcaggagtttgatcaaaatagcgcatccctagcttatgcagtttgcggtacaatgcccttctgacactctctagcgttttttctgatcctaaagcaaagaaatattggtaagtaaactgaattattgcctttaaaattgagcctaaagcataaagaaaacctgcaaacaaaatcacctgcactgttgtgctttgatgcaatagaaagtgatctaagaaatattgcaagccacgtggcaaaagaatattaattacactaacaataaatgcaccaactaaagcaacaatcatttcaaatttaaattgcttaacaaagcccattaaacgcttaaaaatatcaacttgctctttaaatggtatcgccttagaccaaacagattcatgctgttcttcgttattattcatctgtatcttcacctactttcgcttgtaattcctgtctacgccacatttccgcataccatccatctgcagctaatagttgttgatgattaccacgttcaacgatttgaccatcctttagaaccaaaatcaaatcagcatccatcacggaagtcaaacggtgagccgcgatcattgtagttttatcagctctctcttttcttaatgatgacaaaatctcagtttcggtctttgcgtcaactgctgacaatgcatcatctaaaatcaaaatctgactatcttttagcaatgcccgagcaattgacattctctgtctttgaccaccagaaagagataagccattttcgccaactaaagtttcatagcctttaggcatttgcaaaacatcatcatgcaaatcactcttcttggctgcagctgcaatatcatccttatctacattttcagaagagaaagcaatatttttgccgatactagttgaaaacaagaaattattttgaggaacgtaggagatctgactgagtaatacctttagttgaatatttctaatatcttttccattcagagtaatttgaccatcatactgatcaaattctcgcaaaagcagttgaataattgtggttttacccgcaccaactcgaccaactaaccctaaagtttgcccaggttttaaagtgaaattgacttgctttaaaactggaatatctggctcatctggatatgcaaatgatttaatgtcatattttaattcaccttgcaaatcttgagaagtaatatttggatctgcatgtgcatcagtaatcaaaggcctttcatcaagtaacttttctacacggtcataacttgcactaccacgctctagaatattaaacaaataaccaatagcaaacattggccaaaccatgttagaaatatacgcgataaaagaaaccaactggccaattgataaaatcttgttagttactaatagtcccccataaataatcgtgatcacatacgtagtaccgataattattgttcccagtggatcaaataaggaatcccagacaaaaacttttttattaatattgatcgtttcatcgaccatcttgtcaaaagcagcagtatcttctttcccttgaccaaaagttttgagcaccttaatcccagatacagattcctgagttttattattcagcttagagaatgcagcctgtgacttatcaaaagcatcatgtaagtgatcacctaatttccaagctcccaatgccaaaaacggtaatggtaataaagctacaatagttaaacgccaatcaacaaaaatgatcatggcaatcattgttgaaagtcccataactaaagaatcaaccaatgttaaaacgccatcaccagcaacgttctgaatggcagaaacgtcattagtagcatgagccattaaatctccggttcgatgacgctgataaaaagtccgatccatcaccataaaatgatcaaataactttgaacgcatttggcgctctaattctgctgcgccgccccaaatttgtttacgccaaaaatagcgcaaaatataaagtgtgaatgcagcggccacgacagcaatgatcaacattccatattgtccccaagagatgtgaccttgatccaattgatcggccattaagcctaatacacggggcggtaccaagttagctaaagaagttaacgccaaaaaggtaatgcctatgatataacgttttttctcagccttaaaaaaccaccctaacttactaaatattcccatatttcacctcattcttaaaagtgcacaaaaaagacgaaggaaatccttcgccttttctaacaaaactaattaaattaattacttttgttggtgcttcatcatgttcattacttgatgtaccttcttatttgaaggcttttgacccatttgggacatcatagcaacgatcatatcttcactaataggaggattttccttaaagtacttcttcatgtaagctcttgcaccgtaaaaacctgctacagcgccaatcaagagcgcaatgataattaaaaaaattgctaaacctaaattcatattaaatcctccatctaactaacatttatatcttatcatagttctctaactttttgaaagaactaattaatcttttctaagtccttttcttctttgtgctcgcttggcacgttctgaggtaacttccttgccattcttgtctaagatgaccatgttttcaacatcttgcttaaaggcagctctaaagttagctaaaaatttcttatgtagttcttttctttcagcttcttcctctggagttaagccttccttttctttcttatggtaaagttcgttgattcgatcagttacctttttttcttcttctttgctcattgcatctttattatccataataattccacctcacattaacactcattagtctaccctattttatgtcataaaaaaagtataacttcttaagaacgcctgtttgataatattgacattatctggtagaattaggttataatattaagtaccataaatacaaacggagaattaaaaatgccaagaaaaacaagcgataaaaagcaactagaaattttgcaatatatttacgatacagttgagaaacggagcattccacctacagttagagaaatctgttctgcagttggtctttcttctacttccactgtccatggtcatttagctcgccttgaaagaaagggctggctagtaaaagacgctacaaaacctcgtgctttggaaattacccgtgaaggtaaaaaagagttaggtatcaagccaaaggaaattccagttatcggtgtggttactgcaggacaaccaattctggcagttgaagatattgatgactactttccactcccaccagacttaaaaagtgatgctggtgaactctttatgctcaaagtccacggtgaaagtatgattaacgctggcattttaaacggtgatagcgtaatcgtacgcaaacaatcatctgccaacaatggtgaaatcgtggtggcaatgactgaagaaaatgaagctacagttaagcgtttctacaaagaaaaggatcactaccgattacagccagaaaatgatacaatggctccaatcattttacctaaagttacaattttgggtaaggtagttagcttgtatcgtaataacattgactaatttcaattttgacctagataatttatctaggtctttctttatgccaaaatttcagttattttttcttcaaataatggtaaccatttctttagataacccgcacgagttggatgaatttcatcagccatatacaaagcgtcttgatgctgaaaatcaggatgatcgtataaatctagaatctcaacgtgacacttttgagccagttcgtgtactcgttcaaccatctgtttgtataacggattagcaaaataaggattagtataaattaaaattggacatttccaccttgcttgagccgttgaaatcatatattccaaagctcccgtaatggttttggtgtcaaagttttgattagtaattttgcctagttttttattttgatttgcatcattagttgaaagttgtaagacaaaaacatcaggttgtgattcggtcagctcttctctaaaacgagcaacataagaatcgtttggcttataagtatcttcatcaactaaggtcgtaccattttctgcatctttaattgcagcaacgccatcacgcttccaaagataatcaacaaagctttcacccaaagcgccaaaaccaaaagtaacagaagaacccaaaaataaaattttcttacctatcaaaggactcgcaacggtttgtacactatttagactatacttacgactatttcctgctaaataagcaatatcagtgtaataacgttgatgtaaagcatgctcatctagatccatgcgtaattcatttaaagcgatatccgataaatcattattttgtctaattggaatcaaaaaagtttcattactcattttcagatttttccttttctacatacggcttgattttatcccaatctttaataatatcatctgttagcttgcgattataaaaaacagcggcaggatgatattctgggaaaatagtgtatctttcttttgaccaaatatagccgtctttagtttcatttaaacgtaaaattggtgtatttttaattacttgaccatgttcagctgaaatcttatgaccagaccccaaaagacgttctaatcccgtattacccaaggcaacaattagttttggttgagcatagtcaatttcaaaatctaagaaatgcgcatgagctagaatctcttttttggttggcttacgattgggatatttgattacttctttattttcacgcttgctaaaaacctttttgattgcaaaaggtcgacttctcacagcagatgtaatatatacctgatcacgtgtcagaccaatctgcttcaatgatttatccaattccttacccgcatccccgctaaagggaatattattaacaatttcatttcgaccaggagcttcaccgacaatcattaataaaggatgttggggacccgagccagaattaattccttctagctgcatgcctttagatcgttctttcacttcgtcaatcagttttttcggataatccatttttccatcttcttttaaatttttgttttactcgactttactggggacatttacaaatgtggataactattatttctaacgctaattccacatttaatattattttttacaaaaatagcttcacaataacaaatgcctttatatcaagattagtaatagatatctgccagctttgtgatttttgtcttagtttcacaaccgtttcacggttgaatttcttcacaatcttttttcatcattactactatacagccattttatcattgtgatctttttaaaataaaaggctatcaccttctattaagataatagtcctttatgatatcagtttaaaagtattacacacagactaattatgcaacagtgtctgcaatattaaattagttgaaccgtgacgataatctaatggtgatgcgccatagtctttttcattacccaaataaagatagtttttggtacctttaacatgtaaataaagttgaggtgatttttcaccttctattttggttctatcaaccgttagtttagcgccagcacgataaagcacctttttattttgcttaaatttggcagtatacgcatatgcatcatttattaaagaaacactcacaggtcctttatcccacaacgtcttaccatctactaaagcaacgtctgccgcattgatatattgtgttttactaatctgaaaataagtatgatcaccttgttgaattgcaggtaaagtcatcttagttttattttgataataataaaattgagtattagcagccgctttcttaggtttaccataatagtttaaaaccgtgccttgctttagatttttattcttgaattgcttgcctgttgcatcataaataggtgcattattatttaaaaacacggttcccttgccattcaaagtagttacttggctggcatcaatataaccgcccttaccaatattaaataattgcttaggcgaattatagtatggtacctcaatttttggtttttgtttattagtaaaataattcttgccaccattatagctaactaattttttaccatttttatcataaatataatttttcttgtgccgaaaatgtaacttgaccgtatttgtgttaccaagccaggttaacacatcgctttctttaacatagcctcctttaccaatcgaatagtaaagcttaccaccaataattcgactagttggcacaggaatcccagctgcaaagcgctgctgaataatataagtcttgccactatattttaaatgagtaccagctttgatattttgatgatatttcgaattataattacctgcacgatcataaattattggtgctttatttacctggattgtattcttagctgcttgggctttcttcgtcgttgcttgtaccgtagtcgtgatattgggaaaagataatataggtgctactgtcaatacggttgctgccacaagtgcaaatttgcaattgaacttcatttatttcacctcattcattccataactccatcatagcattttatatacaacttttgggtagaaaaaaagccagttccactggaactgaccttttttatgattgacgttatgattaacgacgtgcttcagcaattcttgctgacttgccgtgacgttcacgtaagtagtaaagcttagcacgacgtacacgaccatgacgcttaacttcaaccttagcaacacgtgggtcgttaactgggaaggttctttcaacaccaacacctgaagcaatcttacgaactgtgtaagtagcaccgatgccagtacccttcttcttgattacaacgccttcgaacaactgaatacgttcgtgagtaccttcaacaacacgtacatgaacagtaacagtgtcacctgcacggaatgcaggaatatcgtcacgaagttgttctttagttaattcttgaattaatggatccataatatacttttctccttcttcggcattcatcaacgtaccaacgccagcggaacacccctaaacttattcattgtggtcacgccacgatgaatagtatatcaagtagagcttgcttaatcaagctctgctttaatatctgccaacattttcttttcttcagttgttaaaactcgttctttgagcaaatcaggtcgatgcaaatatgttgttctaagagcctctttatgccgccattgtgcaattttttgatgattgccactagtcaatatctctggcaccttttgcccttcaaaatctgctggacgcgtatattgcggatattctaacaacccatgtgaaaagctttcttcaactggactagctgcattgcccaaaataccaggtaaaagtcttactgtagcatcaatcatactcattgttggcaattcaccaccagttaaaacataatcaccgattgaaacagtttcgtcagccaagtcataaacccgctgatcaaagccctcgtaatgtccgcaaataaaggttaattcatcttctttggcccagctttgcgctattttttcattaaaagttttaccttgtggtgcagtaataattaccttacctgtggatggtaacgagtcaagtgcttttttaatcggcataatttgcaaaaccatcccagcgccaccaccatagggcgtatcatcaacatgatgatgtacatcggtagtgaaattacgaaaattaactaaattaagctcccattttttatcttcaagcccacgtcccaacattgaaacttgcaaaggagcaaacatatcaggaaaaagtgtcaatacattaatcttcatcgcgtaagccctccaataactcaacatagacttttttattagctacatctacttttttaaccaccgatgcaatattaggaatccaatactctttaccattatcttcatggactagccaaatatcattagcaccaggcgattcaatatcagtgattttacccaagcgcttaccggattcttcatcaatgacatcacagtcaaagatgtccttataataataaacgccttcaggtagttcaccgcggtcggcttcactaacaactagtatttttccttttaatttttcagcttgatcaatatcagtaatctctgcaaattgaactaaccaaaattgcttaaaaggtctactcttggccacagttaaaacttgagaagtttcacctttgattgccaaatgcatccctatagcaaaacgatcttcagggaaatcagtaattatactaactttaacttcaccattcaaaccgtgcgtagttaaaatccgagcaacatcgtaatattccattttttctcctttaggtataaaaaaagcttgaagcacacggcatcaagctcttaattaatagcaaaattacttattgtattttgcatcgtgcaacttagccatcaagccagcacctgaaagaagtgatctaacagtgtctgaaggttgtgcacctttttgtaaccattcaaagatcttgtcttcgtcaagcttcaattcctttggttgtgaaactgggttgtagtaaccaacttgttcgatgaagcgaccatcacgtggcatacgtgagtctgcaacaacgattctgtaaaatggctttctcttggcaccagcacggtgcatacgaattttaactgacataaattaatttcctcctaaaacttaacgattaataatataccaccaaacttaacaggtgtaaagtatttttccttaacagtttattttttaagaatggaatctttttaccttgcgtaaacgcttcttcttatttttcttgaaattcttgttcattcggcgcattgccatcttagccattggcgaatccattccaggcaaattgctcaagcccttcatatttcctttagacattttactcatcatgtcgcgcatttgcttaaactgcttaatcatcctattgacttcaactacaggacgacctgaaccagcagctattcttcggcgacggcttggattaagcatatcaggattttctcgttcctcaggagtcattgaataaacaattgcttcagtatgatcaatttgcttttgatcaacatttagattctttaattgcggattattagatagtcccggaatcatcttcatgatttggtcaagaggccccattttttgaacttgttgcaattgatcaacaaaatcattgaagtcaaaagtattttcccgcatcttttcagcgactttttcagcttccttagcatcataatcttgttgggctttttcaattaaggaaagcatgtcacccatacctaaaattctggatgccattctatctggatggaaaacatctaaatcgcttaatttttcaccttgaccagtaaataagatcggcttaccagttaccgcacgaattgaaagagctgcaccaccacgagtatcaccatctaacttagtcaaaatcacgcccgtaacatcaaggcgttcgtcaaagcctttggctacatctgttgccgcctgaccagtcatggcatcaacgactaaaagaatgttatcaggatgggttactttctttacccgctctaattcttccattaaaggttcatcgatttctaaacgaccagctgtatcgatcaaaacatagtcattcttgttcttttcagcctctgcaagtccatcttgaacaattttagctacgtctttttctccgtcttcactatatactggaacttttaactgatcaccaatttgtttcaattgatcaacagcagccggacgataaatatcgccagctatcaacagcggacgggccttttcggtcttttgcaaatgataggctaatttacccacagtcgtagtcttaccagttccctgcaaaccaaccatcataatgatagttggaatatgcttagacttgtttaaaggaactgcttcttcacccatcatcttcgttaactgttcattaacgatcttaattacttgttgacctgggtttaaactttcctgaacttccttgccaagggcttctttcttaatggttttaataaagtccttaacgaccttaaagttaacgtcggcttctaacaaagcaagtcgaatttcacgactagccttattaatatcttcttctgagaccttacctttgccagttaaattttttaatgctttttgaattctttcacttaaattttcaaaagccatgggctattctcccctcaattgatttaataaattggttatttcttttttagcagcttcactatcaccattatctaaagataaaagcgtatctgccaagacatcttcaacctgattgttgtcgcgcttcatatgcaatttctcttcatagttctgaagaattttacttgagcgcttgagattatcatagacagcctgacgagatacttgatgattagcagctatttcgcctagagacaaatcattgtagtaatagtcttcaaaataagattgttgcccctgggttaataaagagccatagtaggcatataaatcgcctagctcctcgtttttagttagttcatccattgattttcaccagtctttagtataacaaaggtcataagctagtgctagattaacctatcttagataacaatttctaaaaaaagtggaatttcaaatatgtaatagttgattttttaacgtacttttaattataattagatgaatatattttaacataaggaggaagttgcgttgtgaatctttggcagagaatgaacagtaaagaagatccacgcgtctatgaaaataaagatggacacctggtgcgctcattaaaagtaaaggacttcttagctctaggtgttggaacaatcgtctccgcttcaattttcactctacctggtgaagttgcagctaagcataccggccctgcagtagcgatttcctttattttagcagcaatcgctgctggtttagtggcttttgcctatgcagaaatggctgctgcaatgccatttgcaggatcagcttattcatggatcaacgtagttttaggagaattctggggttgggtagcaggatgggcccttctagcagaatatttcattgctttggctttcgtcggttcggggctttctgctaactttagagctctaatcgcaccattaggttggaaactacccgcgtcattatctaacgcctttggcaataacggtggtattattgatatcatttctttagtttcaatcttgttagttgccttattaattggtcatggtgtttcaagggcagctcgcgttgaaaatgccttagttgtattaaaggtgttagccattctactctttattgccgttggcgtttttgcaattaaaaaagttaacttcaccccatttataccgaaatacaagatgactgctaacggtccattcggtggctggcaaggaatctatgctggtgtttcaatgattttcttatcttacattggctttgattcaatcgccgctaactcagctgaggcaattaatccacaaaaaactatgcctcgcagcattttaggctcacttgctattgctgttactttatttgtcggagttagtttagttttaattggaattatgccttatcagaagtatgctaattccgctgaaccagtgggtttagccttacggtttgctggtcatccaattgttgccatcattgtccaaaccattgctgttttagggatgttcactgctttgattgggatgagtatggccggttcaagattgatctattcatttggccgtgacgagatgcttcctaaatggctgggcaagttgaatgcagatcgtcgacctaataatgctttatggacattaacaatcgtagcaattttacttggagcatttttccccttctccatgttgtcacaattggtttcagctggtactttaattgcttttatgtttgtttctttaggtatttataagttgcgtccacgtgaaggaaaagacattgatgatccttcattcaagatgccattttatccagttttacctgctttaggtttcatggctgctttaattgtcttcttagggcttgactaccaagctaaattttatgctggtatttggtttattttaggcttaatcatttactttagctatggtgttcgtcattcaattttaaataagcaaaataaataaaattaatctaaatacagttaaaaagatctgcattttgcagatcttttttcgtaccattattttttcaatacaattccttcatagagttttactgtaattaagtaataaagcaaatacaatactaaaaagatcgtaaatggaatccaaattttatcgtatggattagctaaaatccctttgaaaaattgtagtccaaataatacatcaatcacacccaagacagccggtaaagcgaacaaggtaccaatctccgctttaatcgagctctttaataacttacgtcttgatccgaccttccacaacatttcatatcgaggacgatcactgtttgctcctgatagcactttaaacattaaggttgaagctaacatagctaagaaagctaagcctaagaagaagcccataaattcaaaacctgacgcaacgcttgctactaagcgatattgagcagatttagaattattcagagaaacataaactccttgtgcatccttagtaactgtctggtcaagtgacatcttttgcaatttttcaatattattaaaattacttctaaagttattgattaatagcaaggttacttgtttgttttttccaggaatcttcacatattcagctggagttacaactttaacctcataatcagaataaggtgttaaactagcaagttggaaattcatctcttgttttttattctttacacctgcaactgtaatcgtctttgtcttccaattcatttggtcgccgttctttcgaccagattggaatttgatttttttcttagcaatttcttggtcagtaacatatagaacaggaaacttctttttcccattgaccttataattcaaagtcgtttgttttctaacggcaacttttttaagttgttgattaactttagcatcccttttatacaacacagcatcataatatgttgcctgaagagcagtctctgtcatattattaaagtttaatccaacagtgatcgcacctaatgctagagcaaaaagcaaggaaataacagttaaaactctattgtaatcacctaacctaaattttagctgacctaaggtaaaagaatgcagtttactgtatttaaactttttatttttccgtaaagcattgataactgtagtaaatacagaatcaaatacaaaatatgaaccagccaaaatagtgacaaaaccaatttcaaccgatttaatttgcaactgatggtaatcccacattgcccagtagccaatggctagaagggcaaggcctagaattacttcagttgctttccagattcggttattacgtaacttaactggtttttgatcctcatgcaaaagcttgattacactagtacttaccaatttgtgccgattccaaattgcagccaagaaaaataaaactacaaagaaaacaactgtccataaaatagccggtaaataaaagcctaagaatttatgcagctgcaaacccagttgagagattaataactgagaaacaacttgagtcaagccgataccaattaaaattcctaatgcagtagcgagtaaaccaataacaaccgtctctgtaaaaattaaacggccaattttactatttctcgctcctaggatcatataagtaccataatcttttttacgcatactaagcaaaaaactatttgcgtaaacaatatagactagggtaataatagctaatagcgctatcccaaaaataaagaccatctgggtaattgaaaaggcaatggccattgaacccttaagaaaagctggattaattgcaatggtcataaacatataaaagattgcagcagctagagttagccccgaaaacaaaacagcataatctttaaagcgactttttagccctgttagtgataatttccaaagcacgtctatacctccctctaacgtctacctaattcagcaataatatcttgataaaattcttctctggtcttattttcttttttaatttctttgccgatttttccatctttgatgaacaaaattctttgagcgtaagaagctgaataaggatcatgcgttaccatcagaatcgaaacttgatcattcttattcaagtctgccattgttttcaataattccgtagctgattgtgaatctaaagctcctgtaggttcatcaccatataaaattgccggattatggaccaatgctcgagctgaagcaacacgctgtttttgaccaccagaaatttcagctgggtatttgtccaagatagattctattcccaatcttttggcaatcgccattgcttttccgtcaatatcctttgccttcactccttgaagcgataatggcaaggctatattctcgcgattagtcaaattatctagcaagttgaaatcttgaaaaataaagccaatttcttttccgcgaaaatctgccatttgattgttcttaagtgcagtaatgtcttgcttattgactaaaacatgtccactagttggcttatctaacgtcgacaagatattcaataaagttgtctttcctgaaccagaagcacccataatgccaacgaattcaccttgttcaatggcaaagctaattccttttaaagcttggtattgcttctcaccttttttaccataagtcttagttacttgatccactcttaaaatttctgacatttttatcctttcactaataatattactgttctatttacttaatacagtaatattatattaaagatttgtcaataatttttgcataaaaaaactccaaaagtaattaacttctggagttctactattttacattacttattgtcttcactcgacttaagcatctttttcagtacattaaccaagccaagagtttcatctttactgagcatccctgtaatagtttggtcagtttctgcacggtgcttttcaaatttcttgcacaaatctttggcagccaatttttttgtcaaagatttgaccttgtcattagttacatgcaattctttagccaacttttcaaaagttttgccatgctgatgatgatttaattcaataagcatttccaattcattagcattaataccaaattttttaaatcgttattcatttgtttttcaacttcattgttaatcttagtaaaaaatgagccaatagtaccttctgccattgtctatattcctttcatttcacatattataaaaaacagccctttttcgagctgttttgaatttattaaagattttcatccatattgaaagtaagtttggacatgttgatcgattcaatcatcatttgaccccaaagcttttcagtttccttacgagtatgggcaacagtcttttgattttccttagtcaaatattcagttaattcatcacctgatttaccttctgcaccagcaataatttcttcaactcgacctctgaagtagcggttaagttcagttaaataagtagtatcaagctgaacaaattgtgggtaatgactttcaacgatagctgcaaatgacttgtaataccaccatgcatcattcatattgtaatccattgaggtattgttatatgaaggatcagtatcattcatattagcaaagaatggtacaaatggagtgaaagttggaccaccgatacataaccacataatagccgcacgatctgctggaacatcacttctaatttgcaaaatatgagcattttgcgtacggttcaaaccgattggacggtagcgatgtttttcttcatccgtacccttaccaaatggatcatacggggtatcttggtagtgtgaacctaaagcaaattgaatatcttccttagtgatcttcttagctgccttacgaataaatggaatatcgccatcttgtgggttttgttcaatttcgggattgaacaatttttgaatataccattgacggttggtgttgtagtgacgatcttgttcagtataggtaccaaaaatatgacggaagttccagccttcatgatctgggttcaaatggtgttcttcaacaaattcttgaatacctttactccacatgaagtaatcaggattatcaaagtcaacttgttcaatcgcaactcgattaccagttgcagcgtaacaatcatctggaatgcgctcggctacccagtggtgacctgtaacaatttccatgtaccaaatttcatctttatcactgaataaaactgagttaccagctggtgaaccgtacttagcaattaacttacctaaatattgtacaccatcacgagctgaatgaatgtatggcaaaacagaagtctgcatgcagtcttcatctaatccatctttaacaagtggatcaaatgctaaagttctctcattaccataagttgattcagtacatgacattgcaacgttttcttggttaattccactttcatcgtagtagccacgatgcttgtagtcaacattaggaacagctggtacacgttgcgcatcttctggcaagtccatttcaaacttgtttaaccatgacttaatatgtttcttttcaccatgacgggctggctcaataatgaacttttgtggggtaattggacgaaaagtgtcatcattacgagcaatcatagtggtgccatcaatcgaggcatttttaccaactaagatagtagtacaagcactatattctttcataaaattctccttataaaacaatatttacatctctaactttatcactagaccaagccgtggaaaagaccgatcgcataatttgcagcatcaaaatcagctaagtcttcagctctttcgcctaagccaaccaatttaaccggcaaattcatttcgttacggatagctagaactacaccacccttagatgagccgtccaacttagttaaaacaagcccagttaattcggtggtcttgtcaaagtctttggcttgcaaaagcgcattttgcccggttgaaccatctaacacaagcaaggtttctgttggctgatctggtaaaagcttcttgattgttctttgaattttttccaattcagccattaaattcttcttattttgtaagcgtcccgcagtatcgactaaaagatagtcagctttttccctgattgcccgttcagttgcatcataaacaacagaagcaggatcagccttttctttaccagtaactacgggtacgtcaacacgttttccccattcaactagctgttcaacggcacccgctctaaaggtatcggccgcagctaaaattactgactttccttcatccttaaaacgtttggctaacttaccgattgtagtagttttacctgcaccattaacaccaacaagtaggtaaacgttaggtttagcttcagcattatacgtcaattgctcatcttcgctattgccacctttatcgtaaaggtcaaccaacttttcaacgattactcgcttcaagtcatcacgtgacttagcattttgcaatttagcctcttcacgcaattcattagttaattgttcagcagtttcatagccaacgtcagattcaattaataagtcttctagatcatcgaagaaatcttcatcaactgttctaaacttggcaaaaaaggcgttaagtcttgcaccaaatcccttgttagtcttttctagccccttttcataaagctgttcttgtgattctgttggctcctcatcagaaacttcagtttcttcaacttgttcttctgtttcagtctcagtagtctcttctactttaacttcttcaggctgttgtttagaatctaaatctactgctttttcttcatcaccagattcagcttctacctcagagtcttcttgtgcttctactgtttgttcttcttcatcagtagtttcagttttcgatttagcttcatcaactactttttcagattcttgatcattatcttctgattcagtcttagcttcattttcttgctcagtctgtttttcttcttttttgttttcatcctcttcgtcttttttaccaaagagtgatttttttattcgatcaaataaacccaactatttcacctcatttttattcttcatttcttttaatgaaaccgacaatacttgcgaaacgccagattcttgcataaccacaccatatagttggtcagcctgccgcatcgtccctcgtctatgcgtgatcacgatgaattgggttttcatatcgtatttaagcaaaaattgcgcaaaacgagtaacgtttgcatcatccagggcagcttctacttcatcaagtacacaaaatggtaccggattaacctgcaacatggcaaacaacaaagtaattgcggttaacgcgcgttcaccaccagaaagcagacttaaacgttgctgctttttgccaggcggctgtgcgataatctcaattccagtttctagcaaattattaggctcagtgagttccaatctagctttaccgccaccaaagacaactggaaaaatactcttaaagctagatgctacttgattaaaggtactcttgaagcgcgtcttaacttcttcatctaactcgttcattgacttttcaaggtcatcacgagcttttaacaggtcattttgctgaccattcaaaaagtcatagcgctttttcacatcttcatattcttgaatagaatcaagatttacttggccaatatcttcaattgacatgtgatgcaacttcacgcttttagccagttcattgcgcttttcttcagtattttcgccttctgcttgctctaaagcagcttcaaacgttaaggcatactcttcactcaaagttgacaagcgctgatcaattgcggaattaaacttcgcaatctttactgagtaatcttcttgttcaattgctgcatctttgcgtaaatcataattacgactggcaacttggtcaagttgattaatctgcgcatcaacttgtcctaattgcgcactaagttcattcagcttcttttgcagagtttcattcttttgcttaatttcagctttttgtgtttgtaaatcagaattctttttaactgataattcaccattttgacttaattcagttaatttctgctctaagctatcagtttgcttctgattattagtgatctgaatatttttttctttttcctgactagctaagttttccaacttattagtataaactgcaatttgaggatcaagctttgataattcctcttgtacacgttgacttaagctattgaagttcttaatcttttcttgcaagtcattcattttgcccttttgtacttcattttgcttagccaattgttcctgctgatcattagcctgagtgatttctttctttaaagcagcaatccgatcttgttgttcttttactcgagatttatataaactattagcatcagttagccgctttacttccttttcttgattttggaaagaaatagcagcttcattaatcgcttgattagtctcctgcaaagtatcacgcagttgttgcaatttagccgcaactttttcaccttgagtaactagctcatctaaccgttcttgatcttcagccaaattttgtcgtaaagtctgtaattgcttctctaactgattaatttcagttgccgtctgcagtggtgaattattacgttggtttctttgaccaccagtcatcgaaccacctggggaaatcacatcgccatctaaggtaacaatccgatagcggttaactcgacgtgaaattgacattgcactatcaatcgtatcaacgataatcacactacccagcaaataattaatcgcagcagtaatatcttgatcggctttactttcaactaaatcacttgctacgcccttaaagccactaaaagattgcaaagtagtgatagttgactgtggaatagtatattgacgcaagccatctaatggtaaaaaagtagctcgtccactacgactacgctttaattgattaattgcatccctagcactaactctgctttcagtaatcaaatcctgtacgccaccgccaagagctgtcgtcattgcagcttctagctcaactggaaatgtaatcaattcacccacagccccgatcacaccagggaaatcagatagatgattcaaaacattacgtacaccgtagtaataaccctcatgccgcttttgaatatttactaaagcttcatgtcgcgcttcaactttctctaatttactgcgctctgcgttaacggcttgccgaatctgattaatctgtttagttaaatcattattttgatcattaacttgcgcaaatttttctttttccttttgccgcttaactgtcagctgcttgccttcagttctcagcttttccagttcagtccgagcatcggttagctgcttgcttacatcactattttgataagtagtgtctgcctgactacgttttaattcagtattcagattaacaatctgattattagttgtagcctgatcttgtaaaagttgaatatagtcgttacgacaatcttctagtcgcttactcaattcttctggatcatcgtgcaatttaccagtcaattgatcatgctgctcttgtaaagcatcttgctcctgcttaagttgctttttattccgctgcagttcagacaattcatcctttagcttaaccaagctatttttcaattcttcaacttgacgttgagtttctaccctagttgaattattaaactgttgtgattgctgtgcgacctgcaagttagtattgatctgtgataattggtcacttagctttaataattcactctgcgtttgctctcgctcattttgaattttttgatattctgcccgtttttcagaaacagcactttgcgaaccttttacttcattatccagttttgttaacaggatttggttcctatctgctgctttttggacttcttctttttgccggtttaaatcctcaatttcaaaagctaatagactttttaatttctgatctagtcccttcttttgaaattgatattctttagccagcgaactttgctcatgcagcggctccaatcgaccttcaagttctttaaccaagtcattgattctaattaaattatccttggttttctccatttgcgccttggcagcttctttttgttgtttaaaatgcaaaacaccagcagcttcttcaaagattactcttctttgttcaggacgagaatttaagatctgatcaactcgaccctgagaaataattgctaggctattaggtgaaattccagaatcaagaaagagtgtccgcacatctcgcatccgcacttgctgattattaattaaaaattcactgtcacctgatcgcagaaatcttctagtaattgagacctgatctgaatcaaaagccaactcacgctctttattatcaaaaactaaagtaacttccgccttattgagcggcttgcgaaattgactaccggcaaagatgacatccttcatattcgttccacgtagtgacttagcactggattcacccattacccaacgtacggcttcagtaatgttacttttccccgaaccattaggaccaacgattccagtaattccatcatcaaaatgaatagttgtcttatcagcgaatgatttaaaaccatcgagcactaattctgttaatggcactttttcatccccttatttttctaatttttgtaaagcgaccttagcagcttgttgttcagctgctttcttattgtgaccctcaccttttgattcaacttttccgttaatttttagttcaacaacaaagtgtgaaggtaattgagattcactaataacggtgtattcgatattcacaggaccatcttgctgcaatacttcctgcaagtctgtcttatagtcgcgtgaatcatcgaattcacccttatcaatcaatggataaactgttaaatgcaaaaaatgttcaactgctggcatcccttgatcaaggaaaagtgccccattgaaagcttcaaacacgtcttccagtaaagttttgcggtgtcgtgctccagctttttcttcaccattgcccaagtgaatctcatcttgaaaaccacattcaatggcgaattctgaaaatccttcagttcggacaatattagatctcaaacgagttaattcaccttcattcaacttaggataatgaagataaacataattcgaaacggctaattctagcacagcatcaccaagaaattcgagtttttcataatcgcgaattccatcattgggatgttcatttgaatatgaagaatgcgtaaatgcttcttctaatagcttttcattgttaaattcgatattataatcgtcttttaatttttttaaaaactttgtacttaccataaaaatgcccctttttatacctataaattataccagttttcgggtcacagaaaaaagactgcttctaaaatttagaaacagtcttttgtaattttaaataattgctttacttagcgtaagcaacattgtaccagttagggaaaccattacccattgaatccgatggcttaagtgagtaaccagtaagcttcttgttaacggcagtaattgagtaactattagctataggaattacgtaagcttcatcaaacatgtacttttgccattcttggaatttttcaactctgtacttgtggttgaaggccttctgtgaatccatttcgtcaagtaacttggtgttttcaggagttacgaaacgtgagtagttcattggagccttttcgctatacaagtcattaggtgatggttcacttgataatgaccatgcaccaataaacatatctactgatggatcatcgttttgaaccttgtcgtagaatgaattgaattcgattaaacgaccactagttaacttaacgttcaagcccatcttcttccattgttggatgtagttttgaacgattggttctgctgttgaactaccagtcatagcagctaaacgaatagttaaaggcttgccattaggttgtacacggtaagtacccttcttcttgtagccagccttgtccaagatttcgttacccttcttgatattgtaagtgtaacccttgatgttcttgtcgaagtaatcaccgaattgcttaggaattaaagttggaattctgaatgataaaccgaatgagtagcgcttgtaaacttggttaacattcataccataaccaatagcttgacgtaaggccttgttattcatcttagaattcttgtccattacgttttcgcccttcttggcatcccacttaccaaccttaaagcctaagtatgagtattgtagtggaattttagcgataaagttaacgcccttagtatccttgatgttcttccattgtgagttgattacttgagtaacgtcaaattttctggacttaatactttgagcaactgagttagggttaattactgtagcagtaatctttgaaagctttggcttacccttgtagtagtattcgttaggaacccaagttactgattgaccacgaacaaccttttgcaacttgtaagcaccaaagaacaatggcttcttacggatcttatcacttgacattaagtccttgaatttaacatctttcaagtagtggtaaggagcagcagcttcccaaatgtaaccattacctgaagtgttcataccaggtttcatcgtcttaaagtgaagaactgctttacggccgttttcaccatctggcatttcaaagcctgagatagtctttgacttaccttcatggtattcttgtaagccttccaaatcagctaaacttgaagtgtaacgttgtgacttagtgtctttgttagcaataatttcataagcgtattcatagtccttggcagtaacttgcttaccatctgaccacttaacacccttcttaatttcaacagttacggtcttagctttttggtcaaccttaattgttgcagcacctttatcattgaaaacatagtgatcatcagtaccaaaaagtgattctgcaccatattgcataacttcagtatcagtagctgaagttgaaagttcgtcgttgaagataccagtaaatggggtatcagcttcaacagcaaccttaacagtaccgccattcttagtagccttagtaggaacagcttccttaaacttagaagcagtctttgattcatcagaatgagattctgacttaccacaggcagctaaggtaagagctacacctgataacagtgtaataccagcaaaaagttttgcctttttcattagtaaaattcctccattacttggagcaagttgatcctttaattttatcactattacaaaaacataacaatagcatgaaaaagacaggtatttggattaagatacctgtcttttctattagttagttattagaatttaatataaggaatttgtttatgtttagaattttggagtttagttttactaatgattaatgaattacttagcgtaaccaacattgtaccaaactgagttagcatctgaaggcttaagtgagtagccagtaagcttactattcacagcgtcaatttggtatgcattaactgttggcacaacatatgcttcatcaaacatatacttctgccattcgtggaatttttgtactctgtatttattattaaatgccttttgtgagtcaatgtccttaagaagctgagtattcttcttagttacgaaacgagtgtagttaaatggtgccttttcattgtaaagatcgttaggagaaggttcgctagatagtgaccaaccagccatgaatacatcaacgtctttagagtcatgttgaactttatcatagaatgaattgaattcaattagacgaccagttgttaacttaacattcaagccgatcttcttccattgttgaatgtagttctgagtaattggttcagcagtagaactaccagacatagctgcaaggtgaatggtcaaaggcttaccatttggttgaacacgatacttacctttcttcttgtagccagcgtcatcaagtaacttattagcctttttaaggttataattgtatcccttaatatttttgtcaaagtaatttccaaattgttcaggaattaaagtaggtactctgaatgttaagccttgagtataacgcttttccacagcatcaatgttcattgcataggccattgcttgacgaagtgacttattgttcatctttgcctttgggttcatgacattcttaccattttcccacttaccaaccttgaagcccatgtagctgtattgaagtggtactttagcaacaaagttaacacctttagtgttcttaacctgttgccattgtgaattaacaactctagcaatatcaaatttgtgactcttaatagcttgagaagcagagttagggttaactacagataccgtaattttatctaattttggagtacctctccagtagtatttattaggaacccaagttactgattgaccacgaacaattttactaatcttgtatggcccaaagaacaaaggattcttacgaacagcatctgatgattcaagcttattaaatggaatactctttaattgatgatatggacttgcggtttcgaggaagtatccgttacctgattgaagcatcccaggtttcatttccttaaagtgaattacaactttacgtccatttgctccatctggcatatcaatacctgaaatagtcttagctttgccatcatgatattcagttacaccaacaatgttttgaagtgaagcagtataacgttgagactttgtgcccttgttagccataacttcatattcatactctacatcttttgcagtaacctgcttaccatcttaccacttaacaccttttttaacttcaatagtgatagtctgtaagtgtcaatgtttttgcggtagcctttaaaccattagtctaaccttaatttcttaaatatttatatgacttaaatttctgcttagcttgcttaaataactattgccagctacctgtgcggttaatgcgccatgctggatgcctaaatgaacttcatgacgcttctttaagctgtcacgggccgctgcttttaattcctgttcagtcaatacagttatttctgaatcttcaaactcgctgctaagccaaaattccagctctcgattcttgatgcagcttaagatcctaagcatgccttctgctccagattttgaccatttcttgccttgccccttaacacggtaggtatacttgcggtggttgctctcgcagcagccaatggctttagtcacagtcagttttcgtttcttaaacggcttaatatcgtcccaatgacgatcaatataattccttaggcgccccagataatcatgattgagctcggtattcaattcatcaattagtcggctttctgcagtggttaggatagttttaactttgtcatagctgtatttgtattccaaagcagaaatcagcttgccttgcaggtcaggcgcaaaatatagcctttctttgattttcttatttaggtgaaagacatccaagaaatgctcatgacgcttgcatagccctacaatgtcatcgaagtctgttttggcatatccagcaccgccatcggcgttgctaagaattacagtatcagaaagatcataagtattggccaggtactccttggcttcgttcagcgcatcaagtcggcttaaagaaacaaattccttggcattgattcgctttctgcgtttcttgcttatattgacaatgccttcacagacctgatagcgatgaaattccaaccggcttttagtgcctttgatcaccacgccatcgccttcaagatacaaaactgggacctttttcttagtgcctgcggcatcatatcttgaatctgcttcttggcccgctttaatatttttcccggccatttttaccaaattgcccacctgcatatggctaatattaaagccagacaggcaattgactgctagagcagtattgcgataagtggcaacgctgcttacttctaagatgtttttgactgctaaaatactgtagcgcttgtatttgtaaaagcccattaattcatccaagggataccttgcttgtttgcctgggcagacatatcttcttctgacatacctaacttcgccaaaagccatattgattgagcgctcattcttcttatcaatctgatagccctgtgctttaaccttggtaatcatttcatcatcaactttagctaaagccaaggccatgatttccttaatcaggtttaagaagaaacagattatttttctttcacgcttaatataattatcttcagactttataatatttgcgatttcagttacaattgaattcataaaagaccagcttctaatgtgttttttgttcttaacatcagactactggtctttttgtttgagctcaagtccaaattcaaaggacttgggcttttttaattatttattcaacttaccgtaaaaaattatacacttagtgatagtcttagctttacggtccaacttaaaagttgcaggtcccttgctattaatcttgtaactgtcatcagtatcaaataatgattcattaccaaactgtgctacatctgtgtcaatagcagaagttgataattcattgttaaaaatacctgtaaaaggtgtatcagtttcttcagcatatgataaagtgccgccctttttgactgccttaactggagtagtttccttaaacttcttggcatcctttgcgccagcattgttactgctactcttaccacaagcaactaaagctaacgctgccgcagaaacgactcctactgaacccaatacttttgataatttcatactttgtttcccccatctaggatacaattcattttcaatagttatttgaatcaggttgatgattaaataataccaccataaattaaaaattcaatagttttatgaaattatttttaatttttattttatttgctttcaataagattctagttataaatatgcaaaaacagctctaccaagcgatagagctgttttaatttaattattactttattagttttcacgttgtcttgcgtcaccagcacgttgtaaggcttgaccaacatagttaatacttaaggaaattaccaaaagcaagatagtagctggcaaccacaaccatggacggttaataacgttaactgggtcattagcaaaaccaatcaaagtaccaagtgatggcgtggtacttggtaaaccatagttcaagaatgaaagactagtttcaataccaatgttacctgcaatactcaatacaacgtcgataataatcattgaagtaatgtttggcaaaacttcacggaacataatttgtaaattagatgaacctgaagtcttagatgctaaaacatagtcacgaccacgctgtgataagacgaaggaacggaagtaacgtgccgtcgttgtccacccaaacatcgcaatcaagaataccaaagttacagcattgtagttagggataacagtagtcaaaacaataataattggcatttgtggcaaaatctgaatgaagtcaacaactctcatgataactgagtcgattgcaccaccaaagtagcctgataccaaaccaactactaaaccaactatttcagtaattacagttactgagataccgatcatgattgagttacgcccacccatgatgagcaacttcaagatatcacgaccaccatcatccgtacctagcaagtggcccgcttcaccccaaccatagtatgagtcagcaatattcatttctgttacttgggcacgattcaagaataatgaacctccaaaagtaaacagtaaaatgacaataatgataatcagagcagttaaagcagactttgaacgcacaatttcacgcattgccaccttgaatccagaaggtgggagagttgctttttgcttttcgtcttttttagtagctttctttgtagctttttctttcttatcagccattttttctctccttcctattgaattctaatacgtgggtcaatgatactcatgatgatatctgataataagttaccgattaaagttaagataccaaagataagaatcaaggcagtcaaggtagtgtagtcacgttgcccaattgagtcaaggaacaacttacccataccaggataactaaatacactttcaatgatcattgaaccactaagaagaccggtaatcgtgttacctaagaaggcagcgattggcaataatgagttacgcaaaatgtgcttatggaagacgacgctttctggaacacccttactacgagcagttcttacgtaatcttcaaccttgttatcaacaatcccagttcttaagtactgaacagtaccagtagtagtaatcaaggcatacagaattgctggcaaaatcatgtgatagattctactgccaagtacgccccagaaaccagaggcactagctgaaacagaaccagaaattgggaaccaacccaaggtgaaaccgaagagccacaaacctaagatgtagaatacgaatcctggggtagccaaggtgatgtagttaaaaattctaacactagtatcttgccattcgtcttggtgacgacctgaagtaataccaagagggatagcaatactataagtcaaaatagtagttaaaagtgataaccagaaggtgttgttagcacggtcagcaatcaatgaagttactggcacatgttgaatgtaacttgtaccaaggtcaccatggaacaagttgcccacccatctaaagtattgcacgtaccatggatcaaacagacctgcagcccgttttaaggcttcaatttgtttagggtcggtgttagggttaattgatccactgaatgggtcaccaggcatcattttagccaaaaggaagaccagcaaactcaagataatcaattgagggatcatgattaacaaacgccgtaaaatcgttttccacatgcttaatcactctccttttcttctaattcttcaagtttagcttcgtgggccatatcttttggcaaagctacccagtgcttaggtgctacttgttgtaatggatatacacgaccatccttgtcgtaccatttactttgattttcttcaaattctttttcaacttgttcgcgatgtttcttgtgttcttcacgatgttcaacatcaacttgaggaatagcggaaagcaaacgcttagtatagatgtgaattgggtgcttgtagatttcttcacggctacctaattcaaccaaacgaccacggtgcatgattgccaagttttctgacatgtgcttaacaacacccaagtcgtgtgaaatgaacaagtaagcaatgttgtattgttgttgaatgtgcttcatgaagttcaaaacctgtgcttgaactgacaagtccaaagcagacgttggttcatccgcaacaattaacttagggttagtagcaacggcacgagcaacaccgattctctgacgctgaccacctgagaattcatgtgggtacttgtagatcgcatcactaggcatccctacaatatccaacaattcttgaacacgatcacgttcttgatcagtagtcagattttcaaagtttctaattggctctgcaatgatatcttcaattctctttcttgggttcaaacttgacattgaatcctggaagatcatttgaacatctttattataatcaagcttcttacggttgcttgccttagttacgtccaaacccttatacatgatttgaccacttgtaactttttcaaccccaacaatcgccttaccggtagtagatttaccagaaccagattcaccgattaaaccgtaagtttcaccttcaccaattgaaaaattaatcccatcaacggcacgtacataatcagtaattctgttccaaaatccagagcgaattgggtaatagacctttaaatctttgatttgaataatttcttttgccataaactactccccacttgctgtcttttcatcctcaaagtggaatgacttccagcaagtacatcttacccagtgacctggcgcaacttcatgcaccttaggttcttcttcatgtgcgctagcaggaatccaaggaattcttgcagcaaatctatcaccagtacgtggcatattcttcaaagatggcacagtaccgtgaattacatgaagatcttcatccgtatcgtctgattgaggcattgagttaagtaatgatcgagtatatggatgaagtgggttttcaaaaattgtctttacatcagatttttcaacaatttgaccagcatacatgactgcaacttcatcagcagtttctgctacaacacctaagtcgtgagtgatcaaaataatccctgagtgagattgtttttgaatatcttcaagcaaatccaaaatttgagcttgaatagtaacatccaaagctgttgttggttcatcggcaataataacttcaggcttacatgcaatcgccatcgcaattacaacacgctgacgaagcccaccagacaactcatgtgggtacatttcgtacatttcttcaggctttggcattcctacttgattaaacaattcaatgacacgtgcgtgacgtgccttttcgtccatatcagtgtggtaataaagagtttcagcaacttgatcaccaacacgcatcaatgggttcaagctggctaatgggtcctggaagatcattccgatcttgtccccacgaatcttattgaaaagtgattcattcaagccaactaggtttaattcattgtaaagaatgtcccctgttactttagtatttttatggtcgtacaatccaatgatacttgaggcaattgtactcttaccacaaccagattcaccaacgatggctaaaatctcgtcgcgcttcagagtcagattaacatcgtctgccgcatcatagaatttcccttgcaaacggtatgccgtatgcaggtgttgaatatctaataaaagatcactctgcttctccaaaggtcattcctccatctcgagcttttttattaaaagcatttaatcttttctatttattttctaattctaaacacaaagccggtcgtatgcaaatcacgacacggctttttttagaaaattatccttgatgagacttaatatatgaaacagcatcaccaattgttttaattttttcagcttcatcatcaggaatttctgcgccaaattcatcttctagctgcaagataaattcaaccaaatcaattgaatcagcatccaaatcgttcataaaattagtgtcttcagtgatctcatccttatcaacatcaaaattatcagcgatcatgtctttaattttattaaaaatttcttcttctgacataaaacttctcctttttaataaaacattgtactatttttcagcgaattcgtctctaaaatctgcaacaagtttttctttaaccattttatctacttgcttaagagtgaaataaattggacgttcatttgatctaccgtgggttttaactaccggtgcattaacgcctagtaaaactgcaccgccatatttagccgtatcaaatttagattttaagcttgataacgagcccttcaccattaaggcacctaacttggtcattacaccgccatttaataaactatcttttaataaatgaagcaagacgctagaggttccttcaatgttcttaagtacagcgtttccggtaaagccatcggttactaccacatctgccttgcctaatagcaattcattaccttcaatattacctaagaaattcaaattactttctttaagcaattcataggccttttggtgaacatcatcacccttgtcgctttcagctccattatttaagagcattactcgcggatttttaatgccgcgaatcttctcagcatagtacgaagccatttcggcccattgtaaaagatattctggcttactcttagcattagcaccaacatcaaccatattgaagccatcgtcactattttgaacaggtaaagtaggcatcaaacctggacgaacaatccccttgattcgaccaataataaaaattccacaagcaagcaatgcaccagtattgcctaaggaaagcaacgcatcagcttttccttccttaacgaagttagctgccacaaccattgaagagtctttcttttttctgattgccttaactggttcatcttcatcagcaataacttcagttgtaggtacaactcctaattgatcattaatttgatcttcagggattagttttcttaatgcttctttatcaccaaataataaaaatttagtctcaggcattccagttttagcttgtaaaaccgccttaacgattgcatctggggcattttcgccacccatcgcatcaattgcaattgttctcatatattcaccacaatcttttctaaattctgttttgctctaattgcttatattctagcacttgcttaagtgccttatgtcctggatctaataaatcaggatcagccgcaaccaaagctcgtgcttctttttgcgcaacgaccaatgtattgtagttatttactacatcacccacacgaaattctggcaatcctgactgagccttaccaaacaaatcaccttcaccgcgcatctttaaatcttcttcagctaatttgaagccgtcattggtcgacgcaataattttcattcttgctttacctgaatcggtcttaggatcagctagaaagacacaataactttgtgtttgtcctcgaccaattcgaccacgcagttggtgcaattgacttaagccaaaacgatcagcattataaatcaccatcatattggcattagccacatcaactccaacttcaatcacactggtagttactaaaatatcgatctcaccagctgcaaatgcagtcataatctcatctttttgcgcacctggcatttgaccatgaagcaggactaccttgtgattaggaaaatcatggcttaatttttcatgcaattcttctgcattttttaagtctaacgtctctgactcggtaatcaatggtgtcacagcgtaaatctgaaagccttgatttagctgctcttgcatttgtcgatagacttccttcatttgactacttgttttccatgtggaaataattggctttcttccggctggtaaatgatgtatttcagagactgtcatatcaccataaactgtcaaagccagcgtccgcgggattggcgtagcggtcattgccaaaatatctggttgatcgcctttattaatcaaagcttgcctttgacctacaccaaagcggtgctgctcatcaataatgactagacctaattttttaaagataacactatcttgaattaaagcatgagtgccaattaccacattaatcgtgccatcagttaattcacggtagatctcacaccgctccagtgtttttgtattgcctgttaaaagagctactcgcacacctaaaggacgcaacaattcatcgatttttttgaaatgctgagttgccagaatttctgttggcaccatcaaagccgcctgatagccagctgtaatggctgcaaaaatcgcataaacggctacaacagtttttccagaaccaacatcaccctgcaaaagtcgccgcatttgaccatcagaatgcatatcagcaaagatttcattaaccacatgcttttgatcatctgataattcaaatggcagagatttagttaattgagcaatttctgtcagatcgtatttctttgcataacccatttgtttaccatcattacgggtcaataaagctaattgtaattcaaaaataaaaaactcacgaaaaatcgcacttctcttagctagttcagcctcatgactattcttagggtggtgcattttttcaataattacttggtcttttaaaagacgatattcttgccgcaacttttccgaaacaatatcctgcacttgatcaataaaatcgtcaatagccacattaattagatctactaattttttttgcttaacatgtcgattaaccggataaatcggcgccataccactatcattttctttggctgctacgaatttaaaggccgttaaactttgccgggcaacattgtatttaccataaatagctacttcttgtccgatctcaattttattttttaaccacggctgattaaaaaaattgaccatgatcacatcatggtcaattctcatcttgaaacttaagcgcgttttcttatagccaaaacgactaacaaacgcttcagtggctactattccctttagcattactttttgaccatccatgatttgatctaacggtaatgtttgtaattcgtcataacgaaaaggaaagtaaaaaagcaaatcataaatactatagatgcctaagcttcctaatgcagctgtagtctttgtccctacaccctttaagtctgtgacaggagcaaataatgcattatcaatcattgttattcaactgatactaagaagtgatatacaggttgaccaccatcatgaatttcaaattcaagatcatcatgtttggcttcaagttgttcaactacttcttgtgcttgctcttcactagcatcacggccaaacataattgtgataatttctgaatcttcatccagcatcttttcaatcatatcaacagtagtcttaattaaatcagcattgtcaaccttaatcttgccatcaacaattcccaagtagtcattcttatgaatttctacttcatcgatttcagtatcacgggtagcttgagtaacttcacctgaaacaaccgtatctaagtcctctgtcatagcttccacattttcatcaacagatgcatctggattgaatgaaagcattgcggttaaaccctgagaaatagtcttagttggtacaataccaaccggaatatcactaacttcagcagcctgcttagcagccataacaatattaccgttgtttggcaagacaatagctttcttcgcaccagacttcttgattgcatcaataaagtcttgagttgatgggttcatcgtttgcccacccgagataatacggtttaccccttcactttcaaacaacttacgaataccgttacctgaagcaactgcgatcactgcaaaatcaactgcttcttgttgttcttcatcttggtcaacgatgctttcgtgttggattctcatgttatcaatcttgatcttgcctaattgaccaaactgactaccgtattggaaaacatcaccagggtgttcagtatgaacgtgaaccttagcaatttcaccatcagaaacagctaataatgaatcgcccaagccagacaagtgctttctaaattcttccaaatcaaacttctttttatttggcacatcggcatcaagatcaaccatgatttcagtacagtaaccatttttaatatcttgagtagccaattggctttgaactgaagattggtggtgcattgcattgatcatttcatccatttcattttcgtcaggttgatattgatctgcaaagttttcacccattaagccttccaaaaagccttcatagataaacaaaaggccttgaccacctgagtcaactacaccaacttgcttcaaaacaggcaataaatctggagttgacttaagagccttcttagcaccttcaactacagctttcattacttcagttacatcgtcggtgttattggccttagtagcaccggcttgtgcagcaacacgagctacagtaagaatagtaccttcaactggcttcattacagccttataagcagtagcaacaccatttgaaaaagcatttgctaattcctgtgcagttaaggtcttcatcccttgggtagccttgtaaaagccacggaataattgtgaagtgataaccccactgttaccacgggcacccattagcatacctttagccaagctttcagttaaatcactaacactagtacttggattttccgaaacagccttagcaccactttcaatggttaagttcatattagtaccagtatcaccatcaggaactgggaaaacattcaaagagttaacaaactccgcatttttaccaattcgatgagtggcaacacgtaccatatctctaaattgcttactatctatctcatttaaaaccactatttaaaacctccgcctgtgttattcgtcaagtaccttaacgctttgtacaatgacattaacggccttagtgtctattcctaattgattcttcaaattgaacttaacactatcttgaacattcttacttacttcagaaatcttcaaaccataaccaacaataatgtacacatcaaccgtaatttcgttatcttctgacttgacaacaacaccgcgcttataattggcacgattaagaatcccgtcaaatccatcgcgaatggcattctttgatgccatacctacaacgccatagttagacgtagctgcgccaccaacaacagttgcgattacaccgtttgaaatatcaatcaaaccatcttttgtcttgatcttaacagccatgtttcgtcctccgtcttattatctatatatacgtttattattttatcatagtaacgacataatcaataattaaaatacacctgaaaaaatccttttagtattgaattgcgcgaaaacatatgataatctaattaagtatgacatcacaattaaaggaggtttagcaaatggcaaaagattacgtaacaggtaagaagactacattcggtaacaaacgttcacactcattgaactcaactcgtcgtgcttggaagccaaaccttcaaaaagttcgcattcttgttgacggtaagccaaagcgcgtatgggtttcaaccaaggctttaaagtctggtaaagttactcgtgcctaataaccaaaaccttgttagatcaatattctaacaaggtctttttttactctaatatgctgttgtgcaacatttgtgcaacagcatttttactaaaaaagcatctaagtgacaaaccttagatgcttaatctgaaatttcatatagccagtaattacctagaagtctatagagacaattactgcagtagctatagtatacacgtttaatcatcaactgcatagtaagcaggtacaatcacatgcttatcataatcaatgtagattttatcattttctacttcagctaataatgctaattggctaatgtcttttaattcaatgactgctatcttgtcttctggtttatagtcaatgttataagtatctagtactaatgatccccagaatttttgagcttcaatccactcaaagctcattgtatctagtgcattcattaatctagcatcatcatacattttatgatcaccataatggagtgtagttactactacaaatttcatggttaaacctttctataaaaataagatagcctttaacagctatcttcagggtaatgttcttgcttttatagacaattaataaactcaacacagttattataacacaaaagaccacagctctcactgtggtcttgcttaaggattaaaaacgaaaaagcttcgcgctttctctatcaaaagaacaactatattgtagcacaaaatattattaagtgaacaaaaaccaccttgaaaattaattcaaagtggttttagctgacattatcgttgtttttctcttagcaaaataacatttacaacacttatattataacgcaaaaaagccaccccagacacaatgtccagagtggctttcttgatagatttagagaggaatttttcacttccttctttttttatactttgcagaatttagccggtacccattgcttatcagtaccaatcttatagtatttcacatttttaattgtttttacatcccatactttccaatttgagttagtgggaatgtatttatcttgataatgcccattactatctagcaatcttactttatagtttggattgttgttaataataggaacaaatacaattttaggtattttctctttaggctttgtaattggcttaggattagtcggctgatttgttttcttttctgaatgtaaatcaattagactaatattgccatctacgttaagaccacgccagttatcagtaaattgccaaattgctacgccttccattgatggaaagtaattaaagtcaggtgtatcaattctgcccatagttgcataagaagctacccataagcaattaccaaaacgcttaatcacttttttagtatcaatgttattacgtaaaacactagcacctgaatacaatccaaccttataacctgcattgtggcaaacgtccataaatgcaataattgcagcagtatttgatggaactgatctagtaactacattaccatcgccaacttcccaatctaaccatagataccgtttcttactaataccttcaatttcagcacggtgcacaaagaatttagcttcttttttagcacgtgaaaccgaattgctaaaagtcgcaaagtgataagcatgtaagtaagcatggttagcatgtgtgctcttaacttgagcatgtgccttaggattaaagtaacttaagccttcacttaactttgcaatcacgaatttagcaccatggctaatgtaatttgacatgctagtgggttgatatactgctacatccacgccaaaatacctaaccattattaacatctccctgtggttgattttcaggagcagtcaattgatcagtgggtttcagaatttcattatcaggtacaggagcaacagtaatttcatcgctgtcttccatgttagctaagtgcatagcatttactgctttttcaatcgcaccgttaattacgtttgcagtaacgtttttaatacctaaataatttaaaccttgtacaatcacttgactagcaaattcacgtttctgttcgtttcccatacctgtgtgttctgcttcatgaactgcataggttgcaagttgtcctactacatcaagtgccttgcctgctgtagttgccttgttaattttagctttatttctagcgtaaacacctgcgataattgcaattacataactagcaattgtaattcctaaatataaccagtctctaattgtcattttttaacttctttcttaattcatcattgtctttttcggcatctagccatttttttctgtagatttcagcatcctgttctttctgcttaatttcttcatccttttgctgtagcagtgtggtgagtgattgttgcttgctactatcaaatgctttataaaacagagttattgcactgatcacaccaccaattgctgtaataatgtatccccaattcactcatgacacccactttcaggcatcacaagcagttagataaacaaatccaaagattatcagatctccccatgctgaatgccccattcgatagaatggagtaaagatgccatgcgttaattgcaataatgctaaaaccatacaaacaataccaactattacaagaaatactttactagcaataattagcataattttgtatttaatattgttaatatacggaactaaaaatgcagatagcattaacaagattcctaacaaaattaggaagcagtcaatgtatctgctgttttcaatattctcaaactgtggaggataaatgaaataatggctatcatgaaacagccaaacacctttacctaaaataaaaagaccaattagcagttcacaatttctaattgttaatttagccttccactggtttagcttcttcattgctaccaccaacgatttcttggtattcagcttgagtaattaagcccatatcaatgtaacttcttaattcatcttgactgataaaatcgttatcaaattcaaacttgtaaatctcaaacattacttattacctccttcaacttctggtgtggtgttttgtgttggttcagtaggttgagtagcagctgcagactggttttgagccttaaccgcttgtaattcttttctaatttcacctacttgaacatttgacataatgaccaaagtagtaagcttatctaatttcttatcaagttgatcatttgattgagtatttgactgactgtttgattttaattcagtaacagcctcttttacatcttccacagtgtgaagtaaagcatcatctgaagtgtctacccattcatgagctgtgtagtcatacttttgatgtgtaaagtttggatttggagttttagttacataaggatagcctttatcactcatatcctttgtggtggtatatggaccatcacactctctgtattctccattaataattccagagatccaaaatgtattttcatttaattctgccattttattttcctttctttaaataagtatgtcgttcaatatcaacgacagtgttaattaactatgctttttgcataaaaaatagccatcgtgggcttcaattattttgattttaattgctcaatttgtgttttaagatcatctaaatcagattgcattacataatcatcataggcaggacaccagtctgttgattcagtacctttttctacttttaaagcatcaaatctaacctgagcagttgatgcgattttcaaacattgagaaaaattgccaatatagccaagattaaagtcgctatttgtcttggaattaaaataaccagatactttatattgattgccaacaatttgatgtgcttctacgcctgacaagagatatcgagagccatttgaagagtaaaagatgtaatttgaagcaaaattactaagaataacttgagcatctgtggtaaaccatagtgtttgagcataatatgtgttttgctctattggcaaataagtagttgcgtctttgtgaatacctttatttgaagctgcatcagttaaatatattgatcctaaattattagggtttagggtaatgaatttgccaaactgtatatttcctgctggtgttcttatctcacattttttagaattagcaagcaaattaggtcgaacaatgtcttttgctaatgccaattcttgaccaccaggtgcaaaaatattagccatataaaaactcctttctaagatataaaaaataagcgaatgtatcgcttaagtacgctgtcgtttatcatgaacgacagctttaattcttcgatgaatatctattgggtgctgccatctatagaccagcacctacatcttgagaagtaaagccatacaccgccaataccagattagtatatgaatagcctaaagtgtcgtcataatcggattttgtacggacagctaatgtggtgttgtccgtaaaccaaactgacatagctccgggactgccttcattatcacttcgcttgttatttatttcaccgcgtttcaataacggtgtgcgaaaattgttttcaagagtattattgtcagcatcttgataaaatacctttacaataatttggtaatattgaacatccgaatactttacatcagcttgactaaaatattttgtcatatcaatagtaaaagattgatggttccattcactgttattatcaccaccaatataaaaaatatttaggttttctgctccatttccattaagaaactcattttcacctagagcataacctagaacttttttgccatttatcgttaaagccatacggtcaccttctttattctgttatttcatacaacgtatttggatctttagtagcaagcttatcgtagtcagctttactaattacggtaggctttttcatatatcctgtttcaattgctgtaactctgttgttagtgttattcagatccgtttggttaaccttgcttgataaatcaacagtgatattagcattgccactatcatcagggcttatctttgcgccaccgtttacagtgatagttttaagcttaccagcgttgctaatttcagattcaagctgattctttaagctgtctgcatcagtctttaaaaataccgttgctttatcggctttaccgtccacagcgctttgcaaaccacttaagccactcacttgagtttgaagagccttaatagcgtcatttaaagtactgattgtaactttttgaccagcaataacagcttcgccaggctcatcattcatgtcataaattgcaatgactggtgaaccatctgctgctggtttaaaacttgcttcataagccgcttgagggctgtcactcttgacaaacgacagcttagtggcaagtttttgatttgcttgatccttagtgtagtggtctgtattaatatttccgtttgaatcaggttgaatattatctacagattttaccttaccagcttgttgtagtcttaaatcagtttcttccttagtgtagtaatttttaatggtgtcccctgtaacaaacttggaaaagtctaccttgtcaaactgttgtttcaaggaatccattgacactacagtatcagaaacttgcttacttacagtagtaagtttttggtcattttcactaatgctgtctttaagtggctgaacagtatcattgaaatctttaactgtggaagtcttccatgcgttgtagtctgcctgtaaatcagcaagtgctttagtcttatcatcgtttaactgttttaaagcagcatcacgttgatcagtaattgacttaacagctgcagttatgtcagcttgattactggttttaagattagctaattgctgatttgcagcgtcttgaattgatttagcttcagcagtccaatcactagataatttattgtatttaatagagtaatcagtaaaatcactgttaatcttagtaagtactgcttgtgcttgttgttgtgcattacttgaatctttattcaattgatcaatagtagcttgtgttttttgagtagcacctagcaggtggttttccatagcaataagactacttacataactatcattgataggcttaacagttggatcaactttaacttgaaaatagaaatcttgtgtagtatcaacaatagtgtcgccttgcttaatttgaaagaaacaagtgccactggctgtataacattggtgagtcatttgataactaaagtgtcctttagttcgatcaatcatgttgaatttaccactttgctcaccagtaccatcatcagcaactacacgatcactctctttgatttctgaaaatgaaacatccttatcagttaaatcatagggagaatcatcttcatttaaaattgttacgtccagcactaaacctttttcagtagaacgtaaaaccctcgtgtcgtctgacacgggggttattgatttatccgtttttaatgttatcggtcttagactcactctctttcaccttctttctgtgaatttcttgaagttgagtatttcttaaccttaaactttgattttctttttctagtttcgctattttaatggattggtttgcaataacagttcccaattcatttgctacaaattgttctaatgtattcatttttataaatcccaatacttacttggtcctcgccaatattgcttaatccatgaacctaatacaggttgatcactgcttgttacaacaacattcctaccaccaatctgtgcttgattaggtccaatgtgtgtaatagcaccactatttttatcatgaatatttactgatccagatcccaaattcaaagtataatttggagaatctaaactcaaaccaccaatttcctgactaggatttagtaaattagtggcatctccaaccgcaattgaaatgccatggttttcaacgtgtaaaacaccgttaatagttcccaaacttgtaattgtatcagtcttaatgtgtgatgcatccaaaatagggatatgagcttgatcaacaaagaaattgccagttacttcaccacttgaatcatcaataccaaacaaagcatgtggattgccataaatatcatggaaattaaaacctaagccattaaattccatataagaaccatcattgtttttagctctaattgccatgacgttattccaactggtagagccatcactggaaataggttcaagcattccgccaccaccagacttcagaaaattatcaaagttatctatgttagtaaccatttcctgcatgtggttagcaaaatctttaactgattcatcaagtactaaggtcttcttgccagctttatcagttttatagtgagcattacctaactttgccattaaggtctcccatgcttgagtttgggatgtaccttgcaaagtcatagcttcctgaacagcaccaataaaactatttgatctggcaatggcttgacgtgtggaagtgattttttcattagttctatcttcactagcttgaacaagtaggtgttcatagctagttggcaaatcacctaaagttacatttaaaaaaacgtgggctaaacagtcccacgttgtagctgtaacttcagctttttcagtaatttcataatcaggaaaactaacatccacatagtcataaagacttagttgagtaaagtcctgatcattatctgacatgtcttgataatcaagtgatgtttgaacttgcatatgaccatatctgtgttcaattagatagttcttaccaatttcagtagcttgatcaatatcagcttgtgtagcaacaaaactaccatcactttgctgaccgcttaaatcctgatcatcatgtttgaagtaaccactaatatcaacagtattaacgctatcaatgttaggatttacaccaaatccttcagcataaagtggaccaatcttaacagttacttccttattagattgatcaacatttgcgttgtagttggtgtcagtatcagcggaattatctgtatcagcatctgcagatgtaatatttgaatttttgtcatcaatatcatcttcacagagccatccattttttcctttgtaagttacttcaatgtaagtcttgccatcaccagattttgcttcatgaccattaacaacagtgaatgtctcaccattaggaattgaccagtttaaagcattcttactgtcaggagttgcataaatttcaaccttggaatgatctttaagttgattattaataaagtcatcaaaggaatgtggtttaactgaaccatctttagtgtagttaattgaactagattctacccagccatgactcgtgtgcatgtaggtcttaccgccttgagtaattgttttatcaatagtagacatcccttttttagcagtaactttgactttcttttgcttttcggcccagtaattagcatgtccgtaaactttatggcgtttcttgcctttaccagcccagtgccatgcatgtttgccactaccttttttaataacagtagtattgctagacaccattttatggtccttagtaaagtgatactttacagcgccatctttaacataaccataaccagagttgctgtattgacggtagctgtcttcttcagtaagtgataagtgtggtccatacagccattggtgtggtcctattctgtaccataaatcaccgtttgaattacgttcaaccatgtcatagtcaacaacagtaccatttttaacagtccagtcttgacctagtgacttaacaggatggtgatcaggaccaatttcaggtgaataaaatactctaattgattttcctttgccgtaagcaactacagcagagccatgaacagtaacacgagaacctacaccttcactatcaaacggattactgctcttaacagttaccgtcccactgacattgttaattgcataagcacctgatgtgtcaaaattgatccacttagaatcaatccagccaccgccatcactttgtgcaattggataccagctatcgctattaacagtgttaatttgatatttaccatcaggagtaaatgaaccatcattaacaatctgacctaagtgcagtttcatcccgttttgcaaagtaccaatgatcttttgaccatctacaggacaatcatagatattgatattgccgccagccatgtaagtgatacctactgaatcgtaagtgctttcccatgtagcccagccttgccaattatttttcgcaattgcttgacctggtacatacttagcgacaaataccgcaccagtatacatgttctgaatgttcttatcttgactaaaggtggttttgatatttttaccataggtaactttaataccagaatcacgtccaatacgttttgaatgtctgatattccaattatcaaaatcaaattcaccgccaaacagtcctaaaactgattgagtaacagtatcaccttcctgatcaggatcaataaacaaattacttgcctgctggccgccttgaatattcactttacttactttgttaacatcggaatagaaagtaaattctctctgctcctgcatttgattaaggatttgattgcctaaatcttgtgcagttgcgccgtttaattgaatatcatcagcaacagtagagttagcaagtaacgcactaatgtgttccgcttcaaccaccacattatctaattcgggagtaatgtggatgattttaaaccattgatgtacgtgcttaggatcacagtcttccataatccatttgttaggttggatttccttttggtgcaatcctgatcttggataagtcatagttaaagaccaaaactgattagaattgccattaacctgacaatcaattgcatcaggaagaggaataccgctactagtaaaatcactggcaatactgtcataaagatgtggcattgtcatcaaatcagagtagtcaccataatcaacttcaggaattgtacctacagttaatttcattagatcaacctcctccaatttggtttgtattcagctttagtgatagtagtgccagtttcagcagtaacagtgatagtattctgacccttccacaatttaggagtatcaaggttaggaaaatgagtttgtgtattgtatagattgccatctgcatcataagtatcaccagtagcaccattaagccaaaattcaccttccatattctcaaacgtgtaaggcaagccattgacgtacaaagtgaaactaccatttgcaatgaagtgccaatcaggaatagcagaccatttttcttcaccaactaccacaccgctatcaggcaatgggatataagcaattccatcaatacgatattggaaaggctgacaataaaacggtattgcacatacaccaacaaaatcactagttacatctttagtaacagtgaatggatctttaacaatagccttaaacacatatgttggatcagcagtgaatttaagatattgatatttcatccgcccatcaggatcagttggagcagagagccaatcagttacagaccgttcccaatcaaaccaaccacgttcaggtggtctaagaatttcaagattaaaggtttcagtcacattttggtaagattgattattttgtaagaaatcaccatttctaccttttatatgtgtaggatcaatgtcagctgttggatgaattaaatcccatggcttttgtacgaccatgccaaaatctgttgaagcatggtcttgaaaaatcagcttcacattatcatctaaatcttgcacttaatccccttctttctttaatcatgtcttgtctacggtcttgcttgtagaacggctcaactaactcccacagcttgcgaccttcaggagtttcaagtgtgatatgaatatcacggttttgagcgctcattttttgcaaaactaaaagcatggcttttaataagtcatgctcatctttttcatctttattagaaatacgttgttggttagcatttaaattactgttagctgtaagaatacctacagccttgccaattaactcccaagcacgagttgacttacttggaataagcggaacagccatttcaggtcctgcttcaccaaaaatacttggcgaacttgcaatacccccattagcataccagtgagtagaagtattaaccttgtgttcccatgcagctttagcagtaccataacgtccacggatatagtctttcatccatctcaattgagtaatagcattagttctccaatctctaccagcagatgccattttgcttgctggtaatgattgtggaataccataagcgccacttgatgggttagtaattctaggattccagtgagattcacctgggattccatttccaccatcaataatcaattccatataatgccaccaagattcaggaatgccggcttgttttaaccagtgtaagtgatcacctgtaggctttccacctataccatcttcattttctgacaagtgatcaccaatccaattaagagctttaccaccaagttcacgtttagctaaagctaacaaactaggtttaatcttaggttgatgcttagcttgatcgtgaagacctttaacacggtagtaaccatagcccatagacattgcatcagaaattctactgatacgtgcataaggtggggaggcattaaacattgtgcctttgcttggattgttgataataccaacgtgaccagctgcaccagtaccatgaccaaaaatgaccaaatcaccaggctctgttttagataagtttttacctaaatactgaacacctgatgattcctgcatagcaacagtagtacgaccaatgttaattccaaaatgtctaagtgcctgcattaccatacctgaacagtcagataaggtccttgacgcagcacccatttgatacttaacacggtcaaaagtatccttggcatattgcaagaacttagcacgtgaaccaccaccagagccaatggctttattgataaccgtccacatggcttgagaccatggattaccaaagtgagtaccagaacgtttactcaaatcagtagaatctttagttaaattagaaccaacatcatcaagattattggtaaacattgatttaaagctatcagcaaagtgctttaagctgttttctgctaactttctaagttctttcttgctaatgccagtaccatttgcaaagtgtggaagtgagagtgattgagtttgagtaccattaagaacaccccaaccttttctcaatagcatcctacgattattcccatgaggaataataatgtcattttgatcagttactacagcttcttgacgtggaccagattgagcatcattaacgactgctaaagtgtcatgagttaaacgaccatttgcatcagtacccttagcaaagtggactggattaataacagaactattaccaccaaattgctttaatacagcatcaataccacgaataccacggttgatttgtctgattgtgccacgcattgaatcagatgcataaccaaccattttatgcattgcaccgccaaaaccacgagcagtagcagtgcctaatttgattacaccatcgtgcaatctcttaacagattggtaagaccgtttataaagattactaaagtcttgttcagttgattttctgatcttatcagtagttttaccaacacttgaagtcattgacttgaaatctttaacagtcgctttagacatgctagagattttcttggtgaaattacctttgccttcgagtgacttaacagccttttcagcctgcctagaaatttgttcgccaaacttatcttttttagcagtcctagctaaaacattaagacgtttttcaacagtattaatgtttttgtgtaatgactttaattggctagtaccttttgtttttacactaacagtactctttttgcctttgatcttcttgattgccttagagagtgacttaacagatttaacacccttggtttttacagtaaccttatgagtgccacccttaatacgcttcatagccttttcaagggctttgatctgcttagatccttttaccttagcagttacagaaattgacttagaagataagcctttaagtgatgcactagaaacactaacgtttggtacagaaacacgacttgaaccagatgaatatgaacgtcttgctgtggatgttcttgtggatcttcttctagttgatttacgtttctttgttttgcgctttttagttttcttcttagttttaggagcagtagtaagtttcttaaagagtgcatcactgatccacttggacttgccaattcgactgttagcaccaagtaataatccttcatccacgagtgtttcaccgtggtgcggattagtcttagcaacggctttacggtctctactaatacgactggttaacttgtttaactgtacaatcaagccttgggtatttttaccacgctttagagcgtctctaatttctttagcgactttagctctatcagccttgtcatcttgttcatgcttaatcagacgcttacgctcattagcagtagaagcatcatttctgttatgacgttctttttgcttttgatgacgcacacggtcttcatcgtatttcttcttaagaagcttagtaagattaactaaaatcttagcagggctcttaccttcaagactatgtaaatcaacagtaccatttgcaaggtgaacagaacgaccaaacaatttagccatatcacgagcattgataacatcttgccatggaaagatccaacgtggtacattcacaccctgttgaacttccacagagccatcaggatttaaaatgccttccttattattagtagctggcgaatcatgaccatcatttaagatggctggataaccgtatttcttcttccaatcagtaccttcagctaagtgaacattgcctactttaaccttgccacctagcaatttaccaatgaacttaacagtactactgataccaccaaagaaatcatcccatgctttcttgatgccactgataataccaccaaaccatgaagtaattccatgccatgctgacttaaacagtcttactgatgcagagcctacatggccaaagaaatgagacattcctgaccatgcatgttgaacgcctttagcaataccgccaaaccatctagtaacagttctccaagttgctttgagtcccctagacattgcagaaccaagtctagtaaaccaagctgtcattgaatgccatgcattgcgtacgccacgagcaatgccgctaaaccagtgagacatgcctttccaagctgacttaagtcccttagccatgttcttgcctaagttactaaaccaatgagtcattccacgccatgctttttgcacagctttaccaacattaccaaaccatttcccaatgcctttccaagcatttttaaatgatttaactaagctgttcacccatttcctaaacttagaattgtgtttgtaaagtgaattaatagcaccagcaagcggacttacaaagtaaaaaccgacttctttccagtttttcttaaaccacttaatggtattgattacacccttagtaaatccattccacatgttatgtgcagaatagccgagattttcaagtgaccagaatttttttggcggtttgttcttttgccagcctttggtgaaattattgacagcttgaccaccccaacgtccagcatatttgccaagtaaagcaccaatgggagcgagcattggaccaactactggaatcatgctggttaatgtaccaccagcgacagcgccaacagcaccgccaatgtcttgacttctagcattagcattgtgacgatctttaacagcgttgatcacttcaggtgtagcaactgcagtacctgctaaagcaccagtagcaagacgcttacccatagagaacttagtagtagctttaattcctgctgaaatctttttgcctatttcttgaccaaacttttttgcaaaattaaagccagacttaattttgctccagctccatttgcctgcctttgctaagacatttcctgtagctctaaaacccttagctattgcttttccagcttttgtacctaaatcacttgctttagcccagcctttttcaatacctgtccaagctttgatgccagctttttctacagtagtccaagttttacttccaacttttctaaagccgctaaaagtcttggatagaacgccaccaaacttagcccaagctttttcacctttagtagcatctttagctaattcaattcctttgaaaccatcgtgtaatgctttaactgatttataagtagtaacagcacctttaccaatagaaaaaagaccatcactgactttacggatgcctttaattgctaccattgcaattatggcatcagatatagccttaacagcagtcttatttttagctaaatcacctgtagcagtagcaagtgtatgtaatgcactaccagaatccttgccattgcctttaacaataccaagtgctttaccaatgttttgaataatagctgcaaagtctttccaaactgccttaccaacttccacgcctagagagataacatttttagtgatagctacaatatcacctttatgcttatctaagtagccaataacgtttgatactgctttacccagctggtcagcaccgctcataacttctttactagtcatgatattcttcaaggcttgcaagccactagtcttagcatcaaagattggcttagtaaattcctgttctagtttttgtctagcaacagtcatagcttttaaagcaccagcttgactttgaccataacctttaaagctttcatcagcatacttagatgatttagcaatccaagtttggaattgcttttgtgttacattgccagtttttaaaagtgctctaagtttagattctgacataccagcaccatgtgcaagtgtagccatgaatgttggagcagctttggtaatacggctcaaggaggaataagtaactttaccagtactaccaattctttgcagtcctgcagacatttggtcaatttgctgaccagtcatcttagaactatcacctacaccagcaatggttttagccatttgcatagcacctttaaagccaatggttgaccagttaagcatatgagcttgcaagtttgatgctgaatcaccagctaagtcagtattggactttaactcaccgatctgcttatcaagggcttgaatttgtctggtattcatacccatgcctttgaacctaccgttgatcttagcaattgctaaattcaagttcataccctctgtgtaagcagacttaaggcttgatcctaagttagaaacagcatttgaaacagcgttaccaagtgcagatcccatgaagacctctttcaaggttctatgagtttcttgactttctttattaacactagaaatcttagcttttaatctatcccatggtgtaggattgattttcttttgttctgcttcaagaccactaatagcagatttcgctttatttaatgaagtcgctgtttcattcactctgatctgttgacgcttgtaagcttcactagttgcaccagattcagatgcaatacgttttaattcacgtgattgaatttcatactgcttagttaaattactgatcgaacttctataacctgaaattctagcttcattagctttataatgattgccttcagattccaaacgatcaacatacgattttgaaacagccgtagtggtttttaaagtcttttgagcttctgctaatcctgacttgtagtaagtgagagagtttttagccttatcctgttgcttagtcagtgattctaatctactagtagctttcaaagtttgagtagcattcttttgaagtgcagtactgatactttcataagcttttttgcccttatctgtagaagtatcaatttcttcttgctgtttctttaaagatttttgcttttcaactaagccatcaattaatctacgctgactttttacagcatcagataagcctttgtacttagcttcagccgcttcagtagtcttaccagcacttcttaaaacagcttcttgagctttccatgcactggtagtactagatacagcttgccttaattctcgtaacgtttttacaggctgatcaccgtttaatttaatatctgtaatcagtgtaccaactggtattcttcctgccatttatttacctcctttctgttttgtctaaacttgctgcaaagtcccaaagactcattggacgtttgtcctttggtcttgcactcattacttccacaagacggtaataatcagtgttttcataatcttctagggacatatgagcattaacaatcatttgttgttcttgataatcaaaatcttccagcatttcctcataggcatgtactggatcaggatcattaatcgttgtcgcttttggagtcgtctacttgtaagatttttccaattaaatcagtaacaaattcacttacatcttctggagcagaatcttcaatcttatctacttgtgcatctgataaatgcaaaatcttcttcaaaaacttttcttcttcatccaaaagattttcttgtgctgttaaaacatcaagaattgattggtcatcatcgtctttaaccttattaattgcaattgataattttgcaaaaaccttttgtgcctttaaacatgcacgtacgttttttacagttgtttcaacttcaaaagtagttaaatgaagctttttaccattgatttttactaacattgattgattttcctttcaaaaaaagaaaaagaacggctttcacaccgttcttaacaaaattatttatattaatttgccaccgctacccaccctactaattaattattagtgagtgcctgttgaagtagtttgatctttctttagatcaccagtaccaccttggtcagcactcttgtgagttggatcttcagtacctgaaccagcaacagtacctgaaataatccaatcaagcatcttgtcaaagttaaatccatcttcatctgaatagaatttttcgtaaactaaaccatctgatggacgtgcagcggcattaagagtgaatgtatcgtgtaccaaagttgggttttcagtatcagtacccatagttaagtcaccaccaggagtcaagttaccgtatggcaatgcaaagtaaagatcaacgccaacgtttgagttgtatgagtgagcaataacaccaccatatgcaagtggagtactatctttagccatgttaccaaagcctaacttgctatccttttcaagacctacgattgcatcatagaagttatgtggaatgtcgttagcaccgaaagtaccagtaatttgatatgcaccaaagtgttgttcagcctttgcgttagaaccgtaaacagcttgtgcagttcttgaaagaccagtgatgttagcttgagtagcacctttactggattccaaatcaattttaaatacaccatctttaccaatgttggtggtcaaaccgccctttgattcatcggtaacaagcttaccgtccttatcgaacttgaaaacaagtaaatcatttaaaccttgaagttccatgtaattctcctttttatctgaaagctaattgttggttcaccagaattggggtcgtatgtgtgacctgcaaaactagctacaatttgccaaccattagctacaaaaaaagacatgagcgagtgttcaaaatcgttcatgtctactgttgtttttttactataaaaaacgtttatcgctaaacgttgtatctgttccgtgtattggttactgcctgattcatcaaaatcaaaatccacttcactaacgagtacatccacagattcacgtggtgtacgttcgctagttccaaccgcaaaagagtaggctttatgcaatttgggaaaattggaagaattaagaagatcaactacctgctttgcaacagtagtcatttatctaatatctccctaaatttttcagcattagcttttagtactgcatctgcagcttctttttctgcatggtctttaaaatgtagatttgatatttctttttgagacatatcacgtgttccatcattaacaaaccgtgcgactaatgcattatatttatcttcccaacctacagatgtatcaccagtttgaccatcattgatttcataaccagccttataagtaatggcatctctcatgtgcttagacttacgaccatgaccagctgaccttgcatgtgcatagcttgcatgagactttggagtattctttttaagaacttcagcgtaagtcttagcaccttcaccagtgatttctgctttttgattggtagatagattaactttcttagtaattttatctagccaatcatttaagcctttatctaaatcaaccatcacgatcagtcactcgtgtgagagtgatcaaatctcctgcagttggattttgaaatggatcaggattaatatcactcacttcataaagcttattgttaagcattgcatgagtgataccatcataatcacgtttgtgatgaataactacaataaatgaatcatcacgatgatgccctttattttgaactatttgaccagtagttaatccccaatgtccacatagtgtaggttttgcgagtcgtttaaactcatttgttggaagaccgttatcatcttcagtatcatcaacagtaccaaacacaattttatgaattagtctgtcccagctctgaagttgcaccatcgtcattcaccacctttgattcatcataagtcccacggagttgacctatgatttgttttgctgtagttgatgacacagcagcagagggatgcaaaaaccagttagttgcaattgcattaacagctagcttatacagctcaaacactgaatcatctttgtaaaaactatcatcagcatcttcaccaattgcaccctgaacgtaattttcagcacctttcagtgttgcttccatacgttcttcatctgaagaatccaatgcatcatcatcaggcaagtaaccaagtgagcgcttaagcccatcatcaatttttaaataagtggtcattattgatcacctactttctactacttacctgaatcagtgcttgttggtgcagtaactgcttgcataagcattggttggctttcaaccttatcaaatgaacctgaaatcatcgcctcatcatcccaaatcttggtatcaaatctgttcaatgcacggatcgcagtttggttacgtctaaatgccttatcagcaatgttagaagtaagcaatgacatttgttgacggtcgtacatgtgaataaattccttaaagttaccaaagtaaaatggatggctttgatacttgccaccaacagtagtgttgttagaaaggtatctgtcttcaaccacacgaacgttaatgtattgcataccatccatgttgaaggtggtttgttgagtacgtggatcaacgttcatggcacgtgaaccgtctgacatacgaaccttagctaaggtcaagaaaccagacttgttagttaacaaggtagcgccaccccataaagccatatccaattcacctaatgcatcaataatgtcatcaagcttagtgatagtagccttcttttgtgagttaggaagtaaaccaacaatctttgagttataggtaacaacattcttacgtgcaatgtgttggtttaaccatgcttcaatatttgcgtttgagtcattgattaaatcatttggagcaaagaatacatcaccataatcatgaatgttatagctaagttgcttaactgatgggtaattgccttccttaatgtccttatcttgccacttatagtctgaattattagttgaatcatcaggaatatcatccaattgatccattggaataatttcagagaatggttcaatgtttctagtaccgtgatcagtaccaacattttcaatagttactaaatcacgcaagtcatcatattgacgcatcaaagtgttaatttgagtttgttgatcatcaggaatagtcaaaccagcattgccatcagcagttgaacttgatgataagttttccatgtacttcattgggtttctaagcatatccttgaaacctgaagcaatgttcttcgacttttcttcagtcttattttcaacaggcttattagcaggcttgttaaccttttgagcttctacagcatcgtcatagttttgcttagcaaaatcacgagcttgaacagctttgttataattttcagccgtcttcttcatatcttcagcagaaacagattcaggatcagcttcataattcttttgtaaagctaccttcttattaaagagatcagtaaccttattacctgcttcaatccaagcattttgtaattcttgtaaattcatacgttctcttctttctattgccataacaaaagggacaagtcttttttgacttgtcccttatctgtatcttgtttattctcaatgggtttagagtcatcatcggacttttcatgaattaatgttttaatcttattaattgcaccgctacttaaaacaggcactccataagcattaacaaccgctggtgcttgatcattttcaaacataatagaatcagcaaaacctttatctaccgcttgtttagcattcatccaagtagttgcacacatcatacggtaaatttcttgtttatctaaaccagttcgcttgctgtaaagatcaacataggtttgatccattgaatctaatgattgtaatgcactagtaagatcatctacattaccttcaacaccaacgcttactctatgaatcatcatttgagcggttggtgacatttcaactttatcagccgctaatgcaatccatgaagcagcagagcaagcttgaccaactacttgagcagttacattgcctggatatttctttaaagctgtatacatttcagaaccagcatcaatgtaaccaccaggtgagttgatttccaatataacgtcttgaccattagcattactcaacgcttcatttaattgattaggactagccacttcataccctaaaaatgaataaatatcacctaaattattgggtacgattattcccttgattggtactgtcgtcatcatcttcacctccttcatttgctggaataattgacttatcaggaataggtaaatcattaggcaaataaccatagtgctgtaatacatagcgcccttgattgcctgacaaaattcctttacttgataaatcaccaatttcagatgcaaagttatcaccagttgcatcaatagctggtctcacatcataggtaatttggctgttcaatttattggatagttcactttgaactgcaccagcataacgattaatagccttagcatattgaccaccaatttgagtgatgttactttgttggtcaccttgaccattaatataagaatcaggaacaccatagactttggcaatttgcttaccagtccaatctgcttgttgcagtagttttgctacatcgcttttcacttccaacggttgataggtctctaaatcatctaaaacgatcggaccattatcagagttattaacttgacgcataaattcacgtgatctagctgacttctttttccaatcaagcagaccgccaccagtaacacttaaaattcctggtgcttccacagattgagaaagagcatggagtgttaaacgattgcttgcatctttgatatttagttcattagctaaaccagtaagtggtgaaacaccagtcttaccaccattctttgatacaagtctgatgtggatcacatcgctttgtggtacgttctcctttgtttgaatatcaggttcatcaaaattaatgttgtaggttaatcctgatccgtcctctaagagcatcacttgaacttgagacggtcttaaaaactcccaatataaatcaacgccattgatatttctccatctgtaggcataagcattgccatctaatagcagttgtgcaaacatcccttgccaaaaactaaagccattagttaaattagaaggattatcaatcagtgattgtgctctatctttatcagctttcatttttaccagtgctaaatcagctgataattgtgagatcaatgagaaaatatctgaattttttaaagcagtatctgcggaaacatactcactaacagataaatcattcttaaataaagtaataaattcaggatcatttaagctgtagcctgatacattgcttttatttaaattaaaaacaggcattatctatcacctcctccctgaccatgtgggagtagatcaattaataagcctgttaaaagtaaagcaattcctagacctgcaaaacctgctattttattccataaaaaaagagctatgacaataaagccaaagcccaataaataaaggattacatctaagaatttccaaattttttcaaacagcgttttaattatcacccgtttcacctcccaaaagaccagaatcaggattttcaaaccatttaagcacttgttcttgtgtcatccgttctacttgatgtgatttgtcattgatcaatccataatcttcaaagttgtacattccttgatacattgcatcaatttcagcatccacaacatcaatcttcttagtagccttgtccttatcaacttgaataccaatcttgtcttccctaataacagcatttaagagagccgtttcttcgattggatcatcaaatcgtgtaatttttccagtagcgtaagcttcttgcaagaatttagttggattagcaagttctgaagttcgttgtgcaatatcttgaatcaaccaacctgtatttgcattaaggctttcagtaatatttttaacttgataactaccataccggtcatagccaaaaaacttaacatctagtctatgcttttcagtaaattcaagaatccatttataaacttgttcgggattgataatgcctttttcatgactagtaattgtgcagtaaccttttttagctaattcacgataaggcaagccatcttgtttttccttagcttcaatacttcctgcttgttgccatggaataaatgaatgttgcatcatttgccacttatgcatcccttcaggagtggtatacggaaaagcaaaaccaacagctgtattatcagaaaacattgagtagtcaaaacccatataacaaattaagccatcgatcttgaaatcatcattgatagctttttcaacgtctttcaaattcaaatagctagcagttgattgtttaagccacaaattcaagttcttattctggaacttatgaagcgtattagtaagcattccttgatcacgttgcttaattaaattgtcagttctacgcttgcgttcttcatctgataaaccaattaatggattagatttttcccatgtttcaggcttgaaagtttcatcaaggtcatcttgcgcccacacgagacagagagagttatcaccttcacggctataatctttttccatgatgtgctgcatcgtaatttgttcttgatgaaacggacttgttggatcaggataagcagaactaattttgatgaattgatgatatggaattacttgtgcttgaccatctgtaatatcagtcattctatcatatgtatcaagagcaccggtttcatcatagatagctaaaacattgtgggttgaatcgtatttatcagcttcataactgattttccataccttattgttagtttctttttcaatgatttggttagtctgtaaatcaagccctgactctttagctatggatgcaaacggttcaatcttaatgactgcttcaagcattttcttaacataaccaaacaactttgttgattgatcagatgtattagcagtaatcaagaagtccttgttagtgaagttaagcgtatcaatcaagacagccttgcacatttggataccagctatttgtgttttgccttgtccacgtccaacacttatgtggatgtcagtgtatcttctttcaccgtttgcatctttccagccattaatcatagctagaataaatttttgccaatccattaatggaagtggtttatgtaaatcaacgtctggaatgattgatgcaaacttaaaagtattttgtacttctttaacatcataatggtaaggaaaatcagatgtattttgacgtttcaagtcttgtaagtttctgaaacaagcaagcttagtaatataaccagctaatcttttaccatctaatacatcaaaacaatattttgtggcatcatcattgtatttaattctaatgtcgttatagttaattgcctgataagcaccatcaacgtcatgagtttgtgttaaatcaattttcattgcatcaatcacctcttttttactatttttaggcaaaataataggcttaatcacaaaaaaacgtgattaagccctaaaaattatccttgcatttctcttaatgcatccgtggcaactttagatacgttaattttattttctttcgcccaatcatttaaagcttctggaatagaaatatttcttcttacagttttaccatattgattgagccactttgtcatgttgaccgtaacccatgttacttgttggttatcttttaatttccattctttaggattttgaactttaggatatttttcttcaccatctaacattgcagccattgcatcttcagcatgtactaatgcttctggaatagtttcaccatcagttaccataccttgaatattaggtgaagttacaacataataatgacctgattcatcattatattcactaagaattgcaggataagctacgatattttgcttcatattttatgatatgccaaagctaggaggcttaacctcctggcttttctaatccagcctgttcaagaatggctttttcagtcatttttttaagttctttgctgtgcattggaacttctgtttttcttccagtagttggattaaaaaatcttctatgaccaccttttttaggtaattcaataaaaccattcttctttaaaaaacgaaccattttagctggcttccaaggcatatctttcacctcctttcaatttctaagtatattatacacaattatttgtgtataatcaacaaaacctaaaataaattaatcacttaaaaaaatctttcaagctttgaacagctttttttttatcatctgtagtaggtaaatttaaatccatcatttgacttcttgctttaggacttaatcctaattctttaccaatggtattcatctgtttcaacgaatcagacatgatctgataagctggatttttcttgtatcctaaaaaattcttagcaacttccttgccatccacaggagagacgaccgttttatagattggttgctgaacaccatgttcaaggacttcttcataagccatgcggtaggtgtcgtaggctgaacagtattgttgaagtaaatattcatcagcacgtaagattttgtcattcttattgagataagtggcaagttttggatacaaatatttgccgtaagttccaagccatttaggtgcttgattaggtactttcggctttgatagatcaactttgttcatgtttcagccccctttcaaaaacttttaaaattttgtttgtgacacaagaaaacggcactgatgcggctccctagacgttaaaaaaacggggcgggggtctttttatttttgattcatgtataattacacttacaaaatttaaatctcttagaagcgaatttttagccatttacagcgtgatcatttttcaatctagccgccaagttagcaatcaattttacgtccgttattggcggattatctgttggtttaccatgaagtcctgtgccataatattgctcttcaaaacgtgttttccagtagtggcatcttccacagctggtgaccatgttctgaagattcttcatttcttctggatacctttcaactggtagtacgtgatctacaatgttaccttcatttaattgacctctagccttgcagtactggcatagatggtaatcacgtttaaaaactattgctcgcatctcacgccattgcttcgaatgatagaatttgttttgctctgtcttgaccggattacgatagcgagtgatgtgattgtatcgccattgcgactgcttgctgcgtttatgatgcaagcgataaaactcattgcgttcttgcaattctttttcgtgttcaatgtgtttcttgcaataatgatttggcatcatcgcaaactcatgacagtttggaaaacgacatctgcgaactcgtggcattgactggctcctttcatttgataaacacaagcactagggcttgaacctagattaatagttttggagactattgtgctagccattgcactatgcttgcaaaagaaaaacacctggaaaatattcttccaagtgtttattaatcatgttgtacttaaatgtctatttagttgtcaattgaatgcagacaacaacatgaagaaaactaagattgttgtgttatgacatcggacctttttctttactatccgacaatacatattgtgccatgtttcaatccgcatgaagttcactgtttgtccagtgattgtccactaaaagttcactggcaaggtaaaaaataaataagctaaattgcatcagctttcacatatacatgcagatcaatatgatctgcaggttcaacatcacattcatcttgccaatgatcataaagatctgcaaactcattaagtgcgattggtttaagtactttataatagtaggtcttttcatagggtagctgcataattaattgctcttgagggatgtacttaatatagttacctattaatattagcttactattatctgagcagttaataatcgtttggcatattgcgtcaacaaccttctcaatgctaaaagaattaaccatcattctctcttgtccatcagtgcgattactatgacttgaagcgctagacaattgaggactagacaaatcagttaaactacgtccacatcgcctagctaatctaggaagtttatattttaataacttatcaacacggttagcagtcttatcaaaatctacatcagaccaaatattcacaacaatcaactccatataataggtaagaataacaattactaatacatctattataagctataccaagcatttatgctttagagttcatataagaatcaagcccatttttaatatacagatttgatgaattcttcacgcaataatatgagttatccataacattcatccaaatgattttgccagttcgaacagcatatccctgtttaagaaaatgtattttcgcataattattattagcaattttctttttaaaaataattttatataaatgtattaaagtgtcagcataataagtagttgaatgatcaggtgctacaactttatagtaaaaaatctgttttggtttaatactatgcttttcgaaataagaattaatcgtagcttgaccgtgatgagtaacttgtgcaatatgtgcgtttgaatagccaagataattaagctcttcagtacgagcatagtttttgtcttcagattgacgtcccatcggcaaaagtctatggatttcttgcattttaggattagattcaggtaccttagaaattgatccaaaccgatcttctaatttatgaattattactaaagcacgttgataattagttaattccatattagtcactcgcatcgatatacttcttaattgctttagtagcaatgactgacattggttcgttcattcgttgacaataatcttttaattgatcgtaagtataagcgtcaattgttacttccatacaatcacctcttctattcatatccatagccaactaaaccattctccacaatcttaagtgcatcattagtatttcgtgcaattccatgaataacattgaatttcatcaacattttatggaaagctatttgatcaggacgcggtttaccagtagcatttttcacttcaatgtaaaaagcttgatgatcccaatcacgccagccatgcaagtcaggatagccagacggcaagcctgtagtaaaaaatctaccatcaggcgttctaattttaccgacattagcacggaatatatgacaatgatgttgtgagacaactaattcaattttcttttgtatactatgttcactttccattgataaacccttccgtgttgaaaattgcgtctgattcattaggcaatttcatcagtaatttcatgtcatccatacttgcatgttttttctgtaagattaactgtgatgctttaagtgggtagaaatcgcctaaaaagtcatcaccccaaacaccattttttcgataaggaaaaaagtactcattagcgacttcatcataaagtaatgaatctggataaatttttcgtccattcttgtcatgaaaaatagcctttttattatttaacatagttgttgtcctccaggttatgaattctttttgcaagaattacaattgattcccacataaaattatcttgtgcagtagctttatgttgcacagcttcagttaattttttatttgcttgaacttcttccaataaagaatcaaataaatcattacttttatgaatttctttcataagatcgttgttagacttcatggttttataatctgaaaacaaattcagtacacttatcgtagggtaaagaattgcaaataatacaagcagtgcagttttcattacttgtcatccctaactagcattggcttattatccttgttttcttcaggaataagttcctgttgatcagcctcaagacttacttgaactccattgccatcaaaagcaatgtcttttaacttgtttaagttaatcttatgagtaagcaggtctgcatctaattgcaaaactactttattaccattaactttgaaattatttgttgttgcttgaaatttaattgtttttcctgtcatgtttattatctcctgttaactaagcattaaatatgtaaacgatatactggtccaaataaacataaggaaatctaatttttcatttttaaaacaaaaagaaattaagactattaaccagttcattaaaattaatgttaaattgaaatattgttttgctgtcatttataaccaatcagttacttcatattttgcattctcatccaattttcgcccacaatttggacaatacttaataggataaggcaagcctttaatcgttaagtaccacttgccatccatttcatttagattaacgtgaaatctattcatttttggcgcatataaatccggtccatcgtgaaaagcatttaatgtactgcaaagatagcagctacttgaaactgatgtcattcgtcttcaactcttttcattagttccttcggtggtcgattatatgtaacatgttcacattttgtacaaatataatagtcgctaaggctaaacagcgatgttttatatacataactgtgatgacaaaataattgcttaaaaaatagtttcactctgtaaaataaactaataatcatttatctaatctcctaccacacatagaacaaaatttgatttttttatcaagtttaaaggaaaagtcatcataataatcaataagaaccacttctagtgaattatcttttctgataaataattcacagccatctgtataaaaagttttcatcggatcctctgatccactttcaaaatgacaatatggacagatgcttttttttgaaactgcattcatttttaattttcactttctagctttctcccacacataggacaatagttaatcttgctactctttgatacataagtaacttcgacatcacaagataaatttaattcatttccattaatataaacatctccattttcatatctatcaatacctgtgtacccatcttcgtatgtatcttcaattgaaataattgatttttcattattacagtaatcgcacataattattcctccgttaatcagtaatcacaatgtatgcattcactttttcagcgtggttataactattctttaagtccctagccgcttctttaggtgagtcaaataatccttcccaagtttttgcttcattgtcactactactgtgtatagttacaacaatacaacgatcttgttcataataactatcataaaaagtcgagattctaaacagattatattcatctggatcattatcccaacacattaaaatatcgccatacttgtaatcctcattagttttcttcgttcttttatcaattactttcattgccatactcctttatgtactcctgaggcaacataccatattcattaaagaactcaccacatagagcaagatctgatcttacacagtaatctgtagccattatgtgtctagcttcttcaagacccaatttaatatcacgtccgttttcatctttcattttcatgctcctttaatcaatagttatcgttagcaaactatatctagcaatgtccatatctccgcaataagggcaatgtttaatatcatcaatttcagcaataataaattctctgccgcaatgttcacaatggtattcagctaaattatgattgttcattttgatgttctttctttaaattgcgtccacaccagggacaattacctataaagattttgtcagtttcctgagaatagcactcaggatcaggatgagaaataattaaagctggatgatttttacaatcgatgtaagtaaacattattccgtcttcaccattcaccttattaatctcatctggatcaacatagtcatctctgtagtagtcgcgtcctagctttgtctttgggttgatttcacaatatttacacaaatttaaatattctttcctctcaagtgacttccacactgatgaagtgtagtgaattaactgataccgtcacaaaaaatatcagcggtgagtttttgtatagcattgctaattggtaaataccgatatgacatcttttgccaatttgtcacctatttttcttagcactcaatatagtagactgctaatcgtggtgggttggctaaaaatgtgaccagtttgtggtgagtttgtggtgggtcttacgcctacagcctgtagtgttgtggttagtgttactactttttcctgaattgtcaaattaagtgcaacagttaggttatgaagagatatattgcttgaagagttcctctgctgtgtgatattggaggattcggcgatatttgtggttaatggcatcagttgcctgttgaacataagcttttgacttgtctttcatgctcttgcccttagggaagaattgacgcaaaagaccattgcagttctcattggtgcccctttcccatggagaatatgggtgagcaaagtaaatctggcagcccttgatcttggtcatatccgcaaactcagagccattgtcaaacgtgattgatttaaaccaggcaggatgtctgtcaatctccttttgaagcagcctttggcatgtgcttgcccgatagtcaggaatcttgataactacttcaaagcgtgtggttctttcagtcaaagtcattaaagcaggctgattcttgcgtctgacgcctttaaccagatctccttcccagtgcagcggagcttttctgtcttcaacctccttaggacgctgttcaatggaattgccaagatgcttcttgtgcaaagcgtgaccgccatggctgtgatgacgcttgttcctgcgtcttttgagcttcataggcagatcaatattgcttatgtccagcaagccctgatcaatatagcgatagacggttggtgtgctgggacaagggtagcctggcatagtccttttgaattcaccaacgaactcatcgatgctggtggcatcaaatttagctttaaagcgtctggagagcattctcaaaaagacagcataatgcttcaatggattgcgctgatagcagtttttgcgacgcttctcataataaatctgtgcagtatcagcgtaatagtgctcatacaataaatagctgctgtctctttgcaggacgcttccgcgtttgatttcgcgactgattgtcgacttatggcagccaacttcttgagcgataacagtacgggaagttatgccggaatccagcattgcttgaatttgtccacgttgtacgctggttaattgatgatagtgcttagaaatgctagaatttgaattggtcatgaagatcttcctttcttgatttttcgtcacttcaagtttaggtcttcatggcctttttgtttaacacttagtgttgcacttcaattttaaatccggggttactacttttttctttaaaaagtaaattataaaaaagaaaataaatataataatataggcttttaaactaaccacactaaccgaaacacgtcacacccctacagcccaaacggtttgagctaccacatatactcaccacaaccaaccacaactaaccgcaactaatcacagccattaattccaatcaaaatgaagtggttctttctttaattggatgcctacatagcgagttccatttctttctttggttttaggcaatttcttagccatttctctaccaaatttagtcatagacatcaaatgttcattagattctctagcccaatcacgatatgcattgtataaaggtctacccatgatagtgtaattgctaccagctttacagcattcatcaagaaatgcttcaagtggatccatgttttcacggtattgcttggatgcatcttgaacaacttcagggtctttcaagccttctacttgccacatgattgcgccttgaacgatccaatttaagattccagtccattcagcttttaacttgttttccaaattcttatcaactttgttagctggaatttgtacattgaatggaacaaccttaattcttctccaaataccttcatcagttcctctaatgaatggcaagtggttagtagccatccaaatcttgaatttaggatcatattcaaattcttgaccatataaaaatctagctaggattctatctccaccagttaattgcttaactaacgattcatctaaacgtgaaccttcattagcttcagaactggtaactaaacgtgtattttcaagtcgtgcaatatcactattagcacttccgcttgaattgtggacgatgattgactcaactgacatctgctttgcataactaccaagaatatttctgatagtattgataaatacagatttaccgtttctaccagtaccaagtagcaagaaaaatacttgttcagcagtcgatcctgtaattgagtagccaacagctttttggatataatgaatcaatttctcatcatgattgaaaatttgttctaggaagtctttccacataggacaatcaatattgtctgaatattctgatgcggtttgttcactaaacatctttttaatatcatgatctttcaattcaccgttagttaaatcaacataaccagattcagtgtttagaagcatgttgtcatgatcaaatacaccgtgatcaatagttacgtacttcttaaactcctcaatcatgtgtatttttgccatatgggaacgtgattctttaatgaacttattccattctttcattgctttatctttatcctgctgagtagcaaagctgaaatcaggattttcagttttaatcaaattaacaactttttcagctgctaactcaatatgccgtccattatctaattcccaatatgagccattatagaaataccaagttttatcagctgccatatatctgaatacatcaccgaactgatcatttaatctaagtcctcttcctgtatcatcccatgaacgagcaacagcccgttttttaggtttgttccagttaaagactagatctggctctttcccatcttgctcaggattataaatattaacggcttcactgattgctttatttaaaagggatattccataagtagtagcaccacgtttttcatcatatttatctctcattaaactggaattacgaaaaatcgtatccattttgtggaagtctctaccagtccaaaatgcaaggtcattagcaaatgccatatctgcttcagagtgagaattatagaattgttcccagccgcccttcatgaacatggtaaagcgagtaccagtcttagatttttctgcacgttggatgatgtcaggaatagataaatctagcgctgtaatttcaggttcttcaatcttatccggcactgatttatcagcaccaaataagaaattataaagagcttgcatcttttcttttgaaagagtgacaatcttaggaataccaatactgttcccagttagtgcaaagaaacgcccttgttggtacatctcataattgcctttacgtctgcgattgcctggaatctctcccttaaaaatacagtgaatacctgtaccagattggctgacttccatataagtttcatcagtcattaaacggaatttgtttatcagattgctaacagaactatcaccttgatgccaatctgctaaatcatctgaaatatgatcaatatcaagccctacatatccgttagtaaaatagaatgccaagccatcagcacgttcaatttcatctaatgcttttagtgctgtattaaaatctgaccatgtactaggatcattagatttaccagctctaccgttataaggatcaataggaatcttggtatttttattccgctcctttacccatttaagttgaaacaatccccattgctttaaacttcgcaattcttgagggatgttttcataggtaaattttcccatttacttcactccttagaatggaatatcattttcggataattcatctgttgaacctgtattacctttaaatggatcttctacagtttcttgctttttagcagcttgtggtgggaacttagtcttttgccatgaattagtgaaggtactattttgtttgcgagtttcacctttgtaagtattctcacctactgaaatgtagattctaatgaattttccttcacatgctttcatcaaatcttcttttgacttgatgtatttatcaatttgagcttgagttaaaccaattgcatctgcaatatttgccaaatctgctggatcatatgagcctgaatcttgaccggtttctttatccttagcagtccaaacatttgcaaagaagtggcgaccatgtgtttttgcattagtattagctaatgcagaaactttgtctaagtctttacgaactagaaaatcaaattgcatattttcatgaccgctagggcttgcatcaccatggacgcttacaatttgcatttcataagttccctttggaaatagttcacttctgttgtttgtcttttcgtttaaattaataaaacccataattaaataaatcctttccttttagccatgtgccaagcccaaccattcttataatgttttgcctttgcatacatggttaattctttaaaactggttagttcactaacctttttctttgctattagatcaatatggaatttttctgctttaatagctcttaattcttgatctttcttttgtttaatttttctaatttcaattgaaaaatcatgaccgcagatagggcatttcacacattctgctttaataactgcaaaacaatcaggacatgttttaatctgtaatccttcagtactaccgctatctttgcgtggatgtttctcacgatcttccaaagtccacttgtaatcagtatcaggcaaaccaaacctttcaaagttaccaacttgatcaataatgattgcgtgtttgttaggttgatacctcatggctctcattgattgctgtaagtaaattactaggctttgtgttggtcttaatagaactacacatgaacagtcaggaacattaaagccttcacttactagatcaacattgcataatattttgatcttgccttctttgaaatcaaccattatcttgtcacgtttactttcaggagttttagcatctgcatgaactgcatttatacctgcatccctaaaagactgtgctacttccttactaaagctggtagaatggcaatagataatagttttacggtctttagcaaacttgagccatgattttacaatgtcaccatgtataattgacttagtgtaattgtttaaagatttttttgtataatctcctgtcgatccactttttaacgttgatttatcacctaactggtaaccatagactgtaaatggtgccagttttttattttcaattaaccatttagcagttgggcctaataccatagctgaataaatatctttaaatcctttaccagataaacgccatggtgaaccggtaaaaccaagccttggaacatcagaataataattaaatattttctgatatgttttagctcttgagtgttgtgattcatcaacaatgattaaatctggtttggctaaaatatttaatctatttgctactttacctaccgtgagaatggtgcaatggtttaaatcgacaccctgctgtttaaaagaatctttgatctgctttactagttcttggcgatggacaaagaataatacatggccacctttttttactgttaatttagcaatttcactgattactactgacttacctgatcctggagggctaacaattaaaacgccttgatttccagctgctagagcatttctagccttatcaattaaatcttgctgataatcaaataattgaaacatttaatcatcttgcttattaattttctgcatcatcttgataaaatcactggcatttctggtatgatcattttcttgatcaatctctcgttgaatatctctaacgagaccagataatacaatgccatgaccatgatgcattcgaatttcatttccatcatcatctaaaccaatgataataaaatgcttgatttcgttattagtaatcttcaaacaagtttctgcaactttgtcttccatttcctggtttagctttaagtcttcatttacatttttgttaaacattattgtttctcctttgcattttctttaactttatcgaccgctttttctaaatccgacttttcaaatttgaaaaagtcttctgctttgctgccttttcgctcgtctaagcggtttttagcataggtatctatacttccctgcatgattaacccacgctcacctgactgtggtttttggatcatacgggcaaccacatcacagctacccattaaataatcccgtggattatctctgatatctggaccatattgcgtaaattcttgaccacttggatcagtaatttggtactttgcttcccaagccgtaactaagatattgatgttccatttaaaaacgctagcgataaatctaattaaatatgtattccattcattataatcagaaatcttgttagctaatcctgttttggttcctttagccttttcgacaaaaaacaacttctgcagactactgatattatcgacaactaggttgtcatattgactaggatcaaaaaaatcataaaagtcatttaagtcttcgattggttggtctggatccagaacccaaatatcatcgttaccttgccaaaatctcactctttcaaagcttttatctaagctaagcaagtaactttttcctttaagatatttactcaatgttgttttaccaacaccagcaataccgtagacaagccatctataattaggctttctattttcactccatttaaatgctggcattattcttcacctgcatcgcgaatcaaatttttaatgccctgaagctgattaaggacattgctagtaattgctttttcatatgcttggatcattactttcttgaatgcttcccactcatcagtatttttaattgcttgaaaagcttgtcttgcttcggatgaattaaattctgcattttcccatctagcagcaaactttaacttcgcttcttgcttaatgctatcttttaaccaatcttgatcaatcatcgttatctacctctttatctaaaccttcattacggaccttaattactgcttcttcataaattgatcgaaccacatttgctacaacctcacttgggctagcagtaaatttacctggcaaatctggtttatttttattcagccaacgcattgcgccagagtaagttttgccattctttttagattgatagactaaataaattacccaatcgtctgcatcatcttgcatttttttaatccaatcttgaaagtctttaagatccttatcttccatagtcagccatctccattccgtcaaaatagtcttctaggaagctggttaattcttcacgattatcacagttttcaaataagtactgatacatatcctttgcatctgtgaattgacctttaaccatgaatttatcagcgtcatcagctaactgttcttcaataaaatcaagtggtgttctgtactcacaattctgaccaattgcatgaactgtattccctacaactaccgttaagcaatcccaaccagcataaaaatcacgctgtttttcaatcttttggtagttgagttctttagctaattcttttccttgttttgcttccatgatggttttctccctgtttcgtactgactagtaactacatcagtaattgcccaaattcgttgttgtgtttctttgctaagttccatgagttaacctccaataatttgaaatgctgcatcccaaaagccatagcacaaaagagtgaacgttaagatcacgactgctattaagatgccaccaaagatagtttcataatggctttctttatgttggattggtttattaaactcacggtaataattcttatttagcatcccaatcaatttcctttctatgttcattcatccaaatagcagctggatattcaaagattgtcatcttaccgcctctgcctggatgaatattgctacaccaatccggttgaaatggataaagaatatttctttttacccatgcttgtccgtgtggcttagcgtatttcttagcaaattcatcaatactgattgttcttccttgcagttgctcttcagggacatagccacgttctttcataatttgatcaactgctttttgaagttcagtgtcattaatgactagttgcattgtcatcacctggcctatacttctaacaagttcatttgttctgcaacgggatgaatatcatctttagctaatagatcataaatgaatttcttgcctttttgagtccatttaagattgttgtgaactccatgttgaccattatttttttgataatcatatggttcatattgcgtataacctttgtcagcatatttttgatataaaacccaatgtttaccttgtttgaaaataatgtgacgtttattcaactctttatttaaagttttggctgaccaaccataatctttcgcaatttcggtagttgtcataagaccagggtttctcatttgggagtcgaaataatcaacctttggtttctgttttgctaattgctctgcctgatctgctgctaaacgcaaagcttcaggcaatgttttaggaatattgaatttacttggaatttcaatctgttgtttcatttgattaaacaaactcacatattgagcagtaaattgatttccttttttaccagtcatcttatttgctacgaactcgcatccctgtttagtgagcagataattaggtaatacttttccttgcttactggtataagtgcttggaataaagaactgacgtgagctcaaatttgagctctcctctatatctttgatgtaagtacgaatatcacgcattaagttcttgtgttctttaccaatcatttttgcgacatctcggctgtctaaaactgactgaccttcaaaatctaagagtttcataattacttttcctccttatcttctctagctaacttaaatagaaattgtgttgttactcctaagtagtcagcaacatcttgtaatgaatcagctctgggcatacttctatcccatttgctgatcattccgttggacatcttcaagtcatgttcaatctgataaattgacttgtgtttttcctttgcaatgtctttaatcactgaataaagtgacatattagactcctttcttagattttatattgatttataatagaatttgttctattatatgagtataagaaataagccaaatcgtaagacctatgcttacaaaaggcggttcaaaagattttttgctatgtttcctttgaacagtttttattataatagcccgttttctaaattgcaagcatttattttagattttgttctatttcttatgtcgtgtcaaaataaaggagtataaaatgagtgcgaaagacaatgtaatgaggctttggaaagaaagaagacctgatataaaatcagtagctgaattagaaagaaaaatggatttaagtaacggaatcatcagcaaatgggaaacgaaaaagccttcaacggctagtgcacaaaaggttgctgatttttttaaagtaccattaagtgaagtcttagatgatgttacagatgaatctgtaacgctgaacaaaaatgatcaagaacttttagcaatgtttagaaaagaaaccgatggaatgtcaaatgaagaaaaacaagattttcaagattctttaggtattttgatgaacactgcaaagcaaattgttaaaagacgtagaaagagtgaaaaataatatgcctggatacgaatatagattaataccagaagattcatatgaaagtagcaatgatattgctaattctatagttgaagatactgctttaaaatacaatgtacctaaatcagaggtaaggtatccaatggttattaactatctttattcgataatcgggacatgcgatatatgtgcttatacacctaatttaattttcccttttgaaaataatggtcaaaatgctttaaatgattttaattatggattaactgctagaaatatttcatttacagcgcaatctattgatgaagtaagtactacttttgcaaatagagtctgcggctttaccctttttcccgctagtggaccaattatgtttttaaatgcaagtattaatacttggggaagaataatatttactattattcatgagctttcacatgcttatcaagcattagacgaccccacatataaaagttctgttgctttaataaatgcgcaaaagagccaaggaaatccttatcctgaagagcttcagcccattgaaacagaagctaatataattgcttcaaatgtttatgttccagaagattcattaaaaaaagaaattatgaataaatcatttaatcaaatgaaagacatttatggaatgagctcagcagcattacataacagacttaaaaactttttgcattatactattggaatgtcaattaatgctgctttggaatatacattagcatttagaaataataacacgataaaaatggatatttgtcgaagctattgtattcaaagtctgcataaccctgttgtgttttaaaacgtccacagtgacgttaaacctgaaagaaataaggagccaaaacaaatgactgataaaaaagaagacaataaagatggttctgttggttgtgcaataggatttattataataattgcggttttagtgggagggttcttatggataagacattctaatgagcaaagcaccgcaaatattgagagacaagaaagaattgaaagtcaaaaggctaaaaaaagcaatgcaattaaaaagcagaaagctaaccaaactaatgctttaattgttaaaaacattaaggctttccgttctaaaaatgatccagatactaattggtcaaaatatgtaagcaaagttactgttaattccaaagctaacttatctgtggaagttaatgatcgttttgttaatttatctgacaaggataagactacttgcatgcgtggtattaacaaagaagctacatgggatgcttatcattatggcttaattagtaagtctaaagttggcaatcgtttatgggcacaaatatttgacgatgacaataatgaaatgggacgttccacatttgatgtttatgataactataagtggaattaatctataaaacaaaaaagcccacctactgctggaacagtaagtgagcgcaactcaataaacttaataatacttataatgtaatagagtaacgataaaccgactggaatcggcttatttcgtctaccctattttagcaaaaataggagtaaaaataaaatggcatcaataagaaaacgtggcaaaacctggtatgtaagattttcaaagagagaaactcaatgggatccagaaaaacaaaagaatgtttctattttaaaacaaaaatcaaaaggcggtttcaaaaccaagtctgaagcacaacagtacggaattaaaatggaagccgcttctattgatggtgtagatgtagttaagaaccctgtgttcgctgactattttgaacactggtatcttacttttaaattcccgattatcagaaaatcaacgcaaaagagatatattaccaattatcattatcttgaaaaatattttggatcaacaaaaataaaagatatttcaagagctaaatatcaaagcttcttaaattggcttggtaaaaaccatgctcctgctacagttcgtaaaaccaatattatggttaaagcttgtgcaggaaatgcaatagaggatggtttaatcgttaagaattttaccaatcgcacaaccatcacaggaaatcaagacaatgtcagagccatagaataccttaatgaaggagaaatgaataagctggtacaattatgcttaacaaatttaactcctcgttatactagcaaatatttagttctagcggggttatttacaggcgcacgacttggagaactaacagctttaaaatggactgatattgattttaagaataaaattattgatattaataaaacctggaatcctaatttaaaaatactaggaccaactaaaaccgaaagttcagttcgaaagattaaagttaattctttcttattagataaattgaaacaattaaaaattaataattctgaatttatttttgctattcctagaactggattaccaccttctagttctgctgtaaatcaattcttaagaaaagccattaaggaaattggacttaacaaacctgattttcacttccatagtttaaggcatacccatgtttcatacttaatttctcaaggaattgatatagctgctatcagtaaacgcttaggacatgctaatatagcaatcactttatcaatctatgctcacttacttgatgaatataaggatcaacaagatgccaaaattattaattcactcaatcaagtttgtgcaacatttgtgcaacaccgtgaaaaattctatgatattgcaaaacattaaatcctataatatcaacgatttaaagcttataaatatttctaaaaacctatattttaattcaaccaaggctttaaagtctggtaaagttactcgtgcctaatagaccaagagcttgttagatcactgatcttgcaagcttatttttttacttattttaatgatttatataaaaaacggtaagaagaccattttattttgtcttcttaccgttttactttacttcataatattgtgatgcttatcgtcatcaggaatttcgtcggccattctttcatcaattggcgtgtatgcatactcagtaatcatttcacccaccttagttggcaagtccaaatcttgataagttacatttctagctaagccattgatagtagctacttccttcttcttctttttatcaaaaatgtgaacgtggttcttgtacatgtagtcttctacattttattttgcacggtcaagtcttgcttcgtagcgaccgttttcgaaaccagcaatatctttttcaaagtcaatatatttcatttgaattcccttgtttcttttctatagttctattttaacctataaatcatgaaaacgattaatatctttagaataaattgctgcaatcataccattttgcaagctaatcctgaattcattactattaggcaaaaattcatttgatgaaaaaacacgaggatagttcccagaatagtgcttcaactcatatcttgcaccaataatattaaaatcttcgattgcttttaaagctgcaaaaccaatataagaataattttttcttttttgaacaacatgcgtgcctgcattaaaaaagcaaattagattttgttggtcaatcaacgttacttttttcgcatataatctcatttcaggatttagcaacattaatagattgatcaaaaaatgatccaatcttccacctgtagcaccaaaaatcactaattcatccacatgataatcttcaaaagcaatctgcaacattagctcagaatcagtccaatccttgacaggattagaataacgaatgtcttgaacattactttctatttggcttaagtcattttcgtgtaaagaatcaaagtcacctactgccacatcaggtattattcccagttcttctaaaaacaaggcaccacgatcaaccccaataactaaatcagcttgagccagcttttcttcaatatcttcaggccacaattcagttggaccgcccaacaatgcatatgctttcattacttaataatcttttctaatttatgtacttgactgccaacatcaccattttcatacaagtatgaaccaacaacaaatatattagcgccagcattttcagctaatttaatagtctgatcattaataccgccgtcgacctcaatatcaaaatcagagccgacaatctctctaactgacttaattcgattaactgattcaggaagaaaactctgtccaccaaatcccggcttgaccgtcattactaatacttgtttcagtaatggcaaatacggttcaaccacttcaactggtgtatctggactaattgccaaagcagcatcaacgccattagaagctaaataatcgaaccaataatataacttaggcttgtccattgcttcatagtgtagttcgaccaaatctgctcctgcactaacaaaagctggtaccaacttatctggggcatcactcattaagtgaatttcagcatctgtcatcggaaattcacgcttgaaatctttgattagttgcggtccaaaagataaattaggcacaaaatgtccatccataatatcaatatgaaaacggctaattccggcctggactgcattttcaatatcatttttaagatcaatattatttgcgttcaaaattgagggtgcaatcatcatcagctattacctctattttaaatattccggtatgcgaccttcgctaatctcagtccgcatagccaaataatcctcatatctactttccagaatttctctggcttcaagtaacttctttacttcacagcctggctcctgcaaatgctgacatccgcggaacttacagtgaatacttgcctttttaaactcaacaaagtaattacataactcattcaacttgattggtgtcaaatcaattgacgaaaaacctggcgtatctgctaaaaagcccgcgcctaacttaaaaagttcgacctttctagtagtatgtttcccacgattcaagctagttgatatcgcaccagtcgcttgattagcatctttttttaaatggttaagcaaagttgacttaccagcacctgactgtcctgctaaagtccaaatttgatttttttcgatcattttaggaatctgaatttgcatttcatgataatcagtgaaaacaagataacctattttttgataatatgctaaagcttgcttgattgtgtttaactttgcttctgatagcaaatctgctttagacaagtaaattgttacaccaactttttgccaagaaaagaaagtcaaaaaacgatctaacagctctacagaaaaatccggttctactgcagaaattactaacaaaacatgacttacattagcaactgctggtcgcccaattcgattaatccgcggcaagattttcaccagatagctcattcctttatcatctatctgaatttccacatgatcgccaactgccggtttttgctttttttgacgaaaaacgccgcgagcacgcgttctcacgatacccgcagcggtttctacatcataataaccagcaatcaaaccaacgacggttccttgcgctagtttcatttatttagtcaccttttcattcaaaactgtatcgccattgcgaacaacctttaattgtccactaccttctctaatgttaaatggaatcgagaaactcatatcatgcttaatatacaagtcacgataaatattgttcaaggaatgatcatcatccttaatatagatctggacatgatcacccttgccattaacggattctgactcagagttattgcttcctttatcattatcaggcttctcactcttagaaagatcatcaccaacatagttaacggtaaaggtcttagttacagtagtttccttgtcttcctttggacctttcgagatcttgatggtaacagttgaaccacgctcaaccttagtacccggacctggctccatcgaaattactaagcccttctcaacatcatcagaatattcttgattgatttgtaaagtcaggccatgttctttggcatagtcttgagcactcttcaaagaataattacttaagtctttcaaggtaaccatatttgaatgtgatctagcctgcttgccacgtgaaactatcaacgtaattgtagtctgcgtcggcttaacctctacacctgcagcaatgctttgagaaataacttgattttcgtcaactttattagaatattggtcctctctaactacattaaagcccatattttctaatttttctgccgcttcggcatagttcttcccaaccatatcaggaactttaaccatgctagaaccgctggaaacaattaaatcaacgctctttccccgctctagactattgcctgcagttggttttgtcgcaataacccggcctttttttatatcatctgattgtcgcctaataatttttccaacctgtaagcctgctgcttcaagtttactctcagctgctttttctgcaatattagttacatcaggaatattaacatcctgtcgtttatttccagtaccacttaaagcgaaaatcatcataaaaatgattaaacccgcggcaataattgagatcagccaccaccatttgtgacttttgacattctgtaaaaaagtctttttctttactagcttgcttgattctactgattcggtttttgctggctccaccacttctttttcttccttttgtggcttaaatccaggcaatacaattgttttatcatcgttattaccatgatatggtacaaaaaccggttcatctgcccgttcaggatccaagctactatccaaatctgctttcatttcctgagctgtagcatatctatctcgtggatctttcgcggttgcctttaaaacaacattttccagcgcctgtggtacacttgaatctttcttgcgaattgaaggaattggttcttgcgcatgcttcagtgcaattgccactggtgtatcaccgttaaacggaacagttcctgtgatcaattcatataaaattattcccaaggaatagatgtcagattgtttagtaaccattccgccacgcgtttgctcaggagacatataatgaactgaacccattactgaattagtttgtgtaatcgagctttgattcaaagcaacggcaattccgaaatcagctattttaatattgccgcgcttatccatcaaaatattctgtggttttagatcacgatgaataacattgtgcttatgagctaatgcaactgcactcaatatctgatccataattcgaataatttcatttaaatccaaaggtgaatttttttgaatatattcttttagattaggaccatcaacatactccattaccatgtatggcaaaccatgatcggtacctacatcaagtacagaaacaatattaggatgacttaattcacttgtagctaatgcctctctttgaaaacgagcttgggtttgcggttcattctgcaaatcaaggcgtaaaattttaactgccaccttacgttgcaggataatatcttccgctagatagacattggccattccgccttcacctaaggtatcgatgatgcggtaacgttccccaagcagataacctttatcgatcactgctctcgtcctccttgttccaaattaagcagacagtaatattatcaccaccacctaatcgattggcctcactaatcaatttattacaacgttctcttaagctaagctccttagttgccaaaatttgttggatttgtggatcgctaagtgaattggttaggccatcagtacagagcaaaataatgtcgttttcccccatcttgatctcatcaaattcaggatcaatcgtacttgagacgcctaatgcttgcgtaataatatttttctggggatggtgtttagcttgttctttagtaatctgacccatcttaactaattcgttaaccaaagaatgatcttcagttaattggacaaatttaccttcagaataactataagcccgagaatcacctaaatgagcaattaaggcatttttatcaaatgcaaacgccaatacaatcgttgtccccattccatttaagtcaggaaacttatcagcagtctttaaaattgtttcattttcagaatttaattgcacatcaagccatttatgagcgagattagcatctgcaaagtcagtcatactaaaattatgtcctaaatgggtgactgccattgttgaagcaacgtcaccaccttgatggccgcccataccatcacagacaattgctaagacaattcccttttgatttttaaaaacttttacaaaatcttgattgcttttccgtaccttaccaatactcgaagcgtatgctgtttcaatcaaaaatctaacctcgtaacttaaatttagcaatgaaaaatccatcattgccatctagatcaggcattattttcaacatccctgtctttgattcaagtttagttaacttaaatggaactagttcaaagtcaggatgtgcttgcaaaaacttcttaactacctcttcattttcttccattgaaattgagcaagttgaataaaccaactcgccattcttttttaagagtgaacttactgcagttaagattgccaattgaattttttgtaaattttgtaagtcctgttgtctcttagtatagcgaatttcaggcttacgacgcaataatccaagcccagaacaaggggcatcgactaaaatttttgtaaattcacctgccgcaaaaatctctgtagccttacgtgcatcacatgccttagtctttaccttatttgcaacgtgcattctctgggcattatctcgtactaaacgtaattttttatcatgaatatctaaggcagtcacatcaccattaacaatgctttcggcaatttgcacggttttcccaccgggagcagaacaagcatcaagcacatgctcatcttgttcaaagtcaaaagcttctacgactaaactggcagcttcatcttgaattgttaacttgccttcttcaaacaaatcactttcgctaatgccaccgtgactcaaaatcacatcatcgcttgataacttagaccattgtggttgatagttatcccgctctaactgggcaaaaacttgctctttatctgccaactttgaaatacgtacactgtttttagctggctcattaatactgtttaaaactgattttgccttgtctaggccccagttatcaattaaatattgaactaaccattcaggtacgctctctttgacacttaaatatttaactggattattttcagctggtaaaatcaccccgcgcctagtaaacgaacgcaaaatcccatttaccaaccgaaagccagctgaatgtcgcttgccatattgcttagcaagtttattagcctcatcaagtacagcacgatcaggcactttatccaaaaaaatcaactggtaaagtgacattaacaataatggcttaatatatttttcggtcagttttgtcctaactaagccttttaactgatattctaaaaacaatcgatactgaatcgtgccataaacaatattagtagctaaattttggtctgcaattgacaagttagagtgctttaagctgttattcaaactaatattagaataggagccttgatctaagaccttgatcaatgtctctaagctgactgcacgtgcactcttatcgatcgacaatttcttcacctgggacaaacttactaccttgaccatttaaaaagctcttgatgtccattctctttttgccacttggttgaacttcaagtaagttaagtactgaattatcagcaaaactaatggcaaaacgtcctttgttagcaacaacagagccggcatttaaacttgatgaatcagatgcaatttctgccttccagatcttgaaacgtttgccttcaatcatcaaataagcaccaggatctggattcaaagcacgaatcatatcgttggcctcttctgctgtcatatcaacattaagcttttcttgttctttagtgatgttaggtgaaaagacgaccttttctggatcctgtggaacctttttaattgagccatcaataattgctggtaaagtcttaagcaataagtcccgcccaacaattgataatttactaaataaagtgccagcgttatcatcaggctcaatcttaattgcttcttgagcataaatatcaccagcatccatcttcttaaccatttccataatggtaattccagtttctttatcaccgttaattagtgaatattgaattggtgcaccgccacggtatttaggcaaaagtgagccgtgaacattaactgccgcaattttaaccgaattcaaaaacttagttggtaaaaattgcccatatgctgcagttacaatcaaatctgcatgcatatcaattaatttctgcatttcgtctgatccagacaacttaaccggttgaaagattggcaaatcatgcttttctgctgcgatcttggctggtgacttagtaattttctgcttacgtcctacctttttatcaggttgagtgaccacggctttaatctcatagccttcatcaattaacccttcaagtactggaactgaaaatttcggtgttcccataaatattattgatgtcattaaagcatccccttacataattctctctggttcattatcaataaaaatacttaaaccatatttcttagcttcctgcgcggaatcttgaacatggtgtaataattcatttaaatttggttcttttttatattttaccagtatttgataataatatttattttttacacgagaaattgcacttggcgttggtcccaaaataatcgttggctcatgcaagtgctcattcaaatacctcttaatcctaaaagcctcacgagctgcattctgttcttttttagcagcaatggaaatcagcacggtataaaaatatggtggatagttaccagcatgccgcatattcatctcatagccataaaatcgttcgtagtcctgagtttgagctagttgaatagcataatgctctggattataagtttgaattaagacttccccttccttatcagcacgacctgcacggccagctacttgagttaataattcaaaagtcttttcagaagcattatagtcagaaagccataatcctgtatcggcattgattactccaactaaagttacattagggaaatctaatcctttagcaatcatttgcgtacctaacaaaatatcagcttcatgagcaccaaaggcatctagaattttcttatagctaccctttcttctagttgtatcaacgtccatccgcaagattcgtgcaccaggcagaagctcttctaattcttcttgtaccttctgtgtacctgcacctaaaaaacgaatttgcgagctttggcaattaggacaacgtgtgggtactggctcagtatgaccacaatagtgacattgcatactgttagtatccttatgcaaatttaaagaaacatcacaattaggacattttaatacaaaaccacattcacggcaaagcataaaattagcaaaaccacgtcgattgagcattaaaataacctgctctttttttgccaaacgcttttttattgcatctactagctcaacagataaatcaaattgaccaccagcaaactgcacgtgctttagatcaatcaaattaactttaggcaatttcttttgattagccctttcagttaaccgtaaaagatgatagacatttttttgggcgcgtgcacggctactcaacgatggtgttgcacttcctaaaaccaacggacaattatgaaatttactacgccaaatagccacatcacgtgcattataacgtggatcggtttcttgcttatatgaagactcatgttcctcatcgatcacgattaaaccaatattatctagtggagcaaaaactgcactccgagcgccaacgaccaccttagtctcgccacgacgaattcggcgccactcatcatatttttctccctcagatagggcactatgtaaaacggctacctcttgaccaaaacgtgccttaacctgacgaaccatttgcggcgtcaaggaaatttctggcaccagcattaatgcatttcgcccctgtttaagagccttgctaatagcgtgtaaatacacttcagtcttcccgctaccagtaatcccttccaacaaaaaagtctcagcctggcgctgttcaattgcttgggtgatctggttcaaagcaccttgctgctcaccatttaaggtaaccgctgttttatgttctccgtcatcaaatccggataacggatcgcgataaacctcaacactttttttattcaaccaacctttggtaatcgcagaattcaaactcgccgccgtcaatccaagctgtttttctagctggctttggcttttgggataatccgctgcattatcaatgatatccatcaataactttttttgctttaccgcattttgacgtaaagtattgtaaattttgggatattcctctttttttaatgctagttcatattgattttcttttttcttcttggctcgattttctaccacatactcaatctttgcttgatcatcttgcaataatttgcggaattgcttaatctccgccagatccgtaattttatttaaatcaattggatcaccctgaaacagcggcattttggcagctctatcattagctggcactagcaatttgcgataatttgctcgcattacccaaggtagcatcgcttgtaaaattttaattcggtaagaaaaaatattttttgctaaatcagcagataactttaccaactctggcgtaagcggtggcatctcatctaccacaactagcaaatccttaagtttacctttaaattcactttgatcagtgatccccaccacaaaaccttgcactttacgaggaccaaacggaacaactactcttgatccaatcgcaatatccttttctaattctgttggaatatgatattcaaaaatacggtctgtttgccgtgcagctacatcaacaataacctgagcaatcatttaatcacctgtaaaaaagaccttcaccccaaaggatgaaggtcaataaattaatcttcgaggttaacctcggcatgagctgggtcaacagtaactttaccagcagcaatttcttcaagtgccttaccaacagccttatcacacttaaaatgttccaaagttggtggatcaccagcttcaagttcatgtgctctcttagcggcaagaacagataatgaatagcgtgaatcaacacgtgacaataatttatcaattgatgggtaagtaattctcataataattaatcctccttgaccatcttacgatagtcatcaattacacgtttaacactgacatgttctgcatcgacgatcgctttaatatgatcaactgcattagctactgtatcattaactactgcataatcatagtcttccatctccaaaatttcattgcgcgcttgcttaattcgaccacgaattacatcttctgactcggtgccacggtgttccaaacgcaaatgtaacgtatgtagatctggtggggttaaaaagataaacacgccatcgggcatcttttcacgtactttttgtgccccattaacatcaatctcaagtaaaacatctttgccatcatgaagcatcttcttcactggtgcaagaggtgtaccataatagtgaccgacatatttattatattctaacaactcaccatttttaatagcctcttgaaagcgatcttcactaacaaaaaaataatcttggccattaacctcacctggtcgcggttgacgcgtagtcattgaaactgaatattcaaatggaaagactttgttttcaacaatcgcgcttttaacagttcctttaccaacgccggaaggaccagaaagcacaagtaataaacctttatctgccatgctgaactcctcttaacttgtaatatatctagtttgcactaaaattgtttctttttcaagttttctctttgcatacaaaaaaacagacaaaatcgtctgctcctttactaaattattttctcgaatgtctcacacactacttcagtttcatctgtgaactctcgtcccagttcttgacattcgcgcgcaaaaaatttctcgtgtactttacgccaagattcatatgagcgatcgccctcgccttctaaataggcatgctcagctgagacatttttaaatggcataatctcaacagtcttattttgaatcacacaaactggttcatttcgtccatttaaaacaattgcgtacatccctacaaccggtacatcttcttgcgcagaatacaggctagtcgttgccgtcttaattccacttttgaccaaatcactaagaatatctgcatcccggctattagctccaaaagcaaaagcaccttctaatgctgtaggacttacttgatgttctacacaaaaatcacgccaaaatttactaatactagtcatctttaatactcttaatcaaatctgcagcattcttctttgctgcatcggttacatcttgtccagccatcatctgtgcaatcgctgtaatggtttcttccttgctaagtgggcctatttgagtaaaggttgaaccatcttttacttgcttagctaccaagtagcgttgatcacccgcggcagccacttgtggtgagtgcgtaattgcaattacctgcttgttgcgaccgattgagtgcatctttttcccgatagcagccgatactcggccagaaactcccgtatcaatttcgtcaaaaatcatggtacccactggttcaactcggctgaagattgccttcaaagctaagatcaatcttgattgttcaccaccagaaacaattttaactaatggcattaaatcttcacctggattaggtgcaattaagaaaacaatcgcatcagttcccttatcggtaaatgtctttgtttcatcaaaattaatagaaaagcgagctttttccatgtagagatcagctaactcttgcttaatctgctcttccagagaatgagccactttttcgcgtattaaatgcagatctctagcttcttgggtcattctttcttcaatcttggcaacttctgcttgcaatttttcctcatcaaggccgcctgtttcaaattgactgagttctttttgtactttttgataaaaagcaaacacatcagccaaggttgggccatacttctttttcaatgaattcaaggtatccaagcggttagtcacgtattgaaaacgttcctcatcgaagtccattgcatccattaagttcgataattcactgcgggcgtcatttaaagcataaactccatcatcaactgtcttagcaaaatccttaaattttgaaccaaattcagttaaatcagtcgcagcattttgcgcatctccaagtaaagttgcaattccatgctcatcgtcatcatacaattgcatgaagtaattcgccgtatccgcaattttttgataattatttagttcgttatattcttcctcaagtttctcatcttcttgtggatcctcaaggtcggctgcttccaattcattattctgaaactgcagaatatcttgcttctgagctaattcttgggcatcttgacgcaggtgcagcaattgactggttagcttttgccattgagcataatcagtttgataagtggctaaatctgccttaaaagaagcaggggcataattatcaactaggtcaatctgccggtcctgatccatcaaaatttgctgatcatgctggccgtgaatatcaaccaaatagctaccaatctcgcgcaaaacattaatcgtcgtcaattgcccgttaatccggactacatttctgcccttgacagctaattcacgactaatcaccagctgatcgtcatcgtgcggcaaaccatattgatcacacaattccgcgatcttttctttttgatcatccaattcaaacaagccagtaataatcgccttggactcacccgaacgaatcatttctttttgaccgcgaccacccatcagtaatgaaacagcatcaataataattgacttaccagcaccagtttcaccgatgattaccgtcattttttcttgaaaacgaacctttaagcttttaataattgcaaagtttttgatatctagctcaactagcatagcttcactcctatagaccacttacggcgcgctcaaccacttcagctgggctcccttgccataagttgcggccaccatttgcttcgtctttttgtaaatgaatcaagaattcaatattgcctttgccacctttaattggtgaataatcaacgcctaaaacattgaagccgatctccaatgccttttgcatggtgtgctcgattaccgccttgtgcacttcatgatcatgaacaataccgtgtttaccgacattctcagggccagcttcaaattgtggtttaatcaaacaaacggcatcacattgattcttcaaaattgcatacatcggtgccatgatcaaatctaacgagataaaggacacatcggtcattgcaaaatctggcagtccttgatcaaaatcttccggcttcgaatagcggaaattctgcttttccatcaccactacacgcgggtcgtcccgcaattgccaagctaactggttgtagccaacatccaaggcatagaccatctgagcaccgttttgtaaagcaacatcagtaaaaccgccagttgatgcaccaatatctaaacaaattttatttgttaaatcaatgtcaaagaccttaagagctttttccagtttaaagccgccacgcgaaacatatttcttaccatcatctttcacgtaaaacttttccccttcaggaaacttagtcccgctcttatcaattcgttgatgattgtgatcagaaaccagccccgccataatcgctctttgggcagctgaacgagaatgaaaaattccttgttctgctaataaaatatctgctctttgttttgccatttataacaccttttgataaagatctaaaaagccagttagcacttcgccatttagtccatgcaaatcatcttgtgcttgcttaattaagtcagttagttctttgcgactttgatcaattcctaacaaagttaaagtattattctttccttcagcttcatccttgtgcgtagctttaccagcttctgcactagtttcaacgacatcaaccaagtcgtcatagatttggtatgaacgaccaaaaattttggcaaaatcgactaattttacctgttcaatatcactagctcctgcataaactgcagccatctcaacgctagcctgaattaagcaaccggtcttcagccattccatcttattgataaacttggcatcacccgcaacactagcattgttagttgaatcaatatccaaatattgaccgccaaccatcccattagggccaactgctttggtaattaaatctaccaatttcgccgacttactgccttccgcaatccattgaattcccatcggcaagagcgcatccccagctaaaattgcctcagcctcgccccattttttgtggctagtcagcttaccgcgccgatagtcatcgttatccatggcaggcaggtcatcatgaatcaaggaataagtgtgaatcagttcaatcccgcaggcaatcctaatttcaggttcttcaatctttctgcctaaagcatttaacgtagctaaaaacaataacggacgcaagcgcttgccgccacccatcactgagtaggccataatctgactgatcttttgatcttcaacctcactagccaaatgcttagccagataatcatcaattactggggtccattcatctttaaaataagtaaatgctgtcatatttattcctctggtgctgatgcgttatttggatctaatttgtgttctgtgccatcactatcaatcaacttagccacagtttcttcagcactgttaagcttcttttctaaatcacggctaatctttacgccctcctgaaattcttttagggcatcttccaacggaacatttccgttttccaaattttgcacgatttgttccaaattagttaattgttcttcaaaattatttttcttcactgccattttgttcttcctttacctttgtaaccactgcttcaacttgtccatctttaaaatgcaatcgcaaatgatcatccttttgaacttgtttcacagaactaatggttttcccttgttcatcagttgaataaacaaaacctcgctctagcgtcttcaaagggctatagtcatccaactgctgcattacttgggtaaaactattgcgtttatttttcaaatagtgctgcatattatcaatcagtcgttgctgtaaaaaatgctcttgttgctgcatctggccgattctcttatctggactaacgctaaacaaacgctgcttcaacagttgataaccttggacagaatgggtcaaccgattttgcatactattttgcagcctttgttttaattgatcaacttgttgaatctgctgatcatacagtctagtcggctcgcgcaggatgacagaattctgcacccgacttaagcgctcacgtttcgaacgaataatattttgcatgctagctaccaactggctggttaattgcttaatatgcgcaatttcgtccaatgtattaggcgtagcatattctgctgcagcagttggtgttgctgcacgcgcatcggccaccaaatcacacaaggtagtatccgtttcatgaccaactgaagaaattactggcatctgcattgcgtaaacttgccgcacaacctcttcttcattgaatggccacaaatcttctagtgagccaccaccacgaccgatgatcatgacatcatacttgtcgccttgagcggcaatctggcgcattgctctcactaatgaatccgctgcagtatcaccctggacttgcgcaggatacaaatcaatctcagcatgcgggaaacgccgattagctgtaaccataatatcgtgaataactgccccagaagcactagtaactactgcaattcgatcaggaaaatgaggcaacttcttcttatgctctggatcaaacagaccttctttggctaatttggcctgcaactgcttcaattgctcatataaggcacctaatcctgccggttccatttgttcagcataaaactgatacgagccctgtgggccatacacgctgacatacccaaccacataaaccttcattccttcttctggtttaaatttcaccttatcaaagaaggaacggaacatcaccacattaattttagatttttcatcttttagtgaaaaatactggtgcgaattacgccgataacggaagttggacaattcaccttgtaagaagaccttatgcaggtaaggatcattcttaaatttttgcgtaatataataatttaaatcagtaaccgttaaatatttattctcggccattttgtctcctagtcaatttaacaactgcttccattaagaattgtactgtaagaggacctacaccgccaggaaccggagtaatatagctggctttttctttaacattatcaaagtcaacgtctccgactaatttgccattaacatgattcatgcccacatcaacgaccactgccccatctttaaccatatctgcagttaccaaaaatgcttgtcctgttgctgaaactactatatcggcttgtcgtgtaatttcagccagatttttagtatacaaatggcaaacagtaacagtagcattttcctctaacattaatgccgctactggtttgcctacgatattgcttcgaccaataactacaactctcttaccagccagcgtaatttgataatgtttcaataaagcaataatgccttctgcagtagccggttcaacaaagtgattttccatccaaagttgaccaatattcgcaggcgttaaggcgtcgacatccttattagggtcaatcctttttaacaaggcatctgcatcaatctgttcaggtgctggcaactgtaccatcaagccgttaatctcaggatcagcatttagcttatcaattaatgctaaaacttcttcctgtttagtatcagcgggcatttgataaatatcttggataattcccatcttttcagcccgccgcttttttgttcgaacataaatcttgctagcaggatcatccccaatatttattacgcaaaaatgtggcgttattccctcttcttttaatttcttaactttttctttaagattttgccctaattcatttgcaaatgctttaccatcaagaatctttcccataaagcccgttctccttttgtaaaaaaataactggcaaaactgccggctattcatcgctatttaacaaagtttgctaacattccattaataaatggcttttctttaggctcagcaaattcgtcacataaatttaaagcttcgttaactgctgccttagcatcaatttcatcgctatgcttgatttcaaataaagcaacttccatgatggctaccacagtttgactcacacgttcaagacgccagccctttttcaaatgactagttagttcagactgtaaatttttgcgatcttctagtacgccttcgattaacttcttagaataggcagaaagctgttttaaattaagcgttgcaacgacttttgcttcaacttcttcggcagttaaatctggctcctgattagccaaataaacggcttgcatagcaacttttcgactttcgtgttggttcattatttttcttcttcgtcctccggaaacagctctgatgtagtctggtcagtattttcatcttctgggaaaactaaaccgacaacatgaacgttgattgccttcagctcaagatcagtcatttgcaataattgtgccttcaacttcttttgcaacgtcattgcaaccttaggaacgttaacgccgctttcaagataaacataaatatcagcaattagcttattatcgtcatcaacactaatatttacgcccttaccatgatcttcacgaccgaaaacccagtttaagcctgatttcaaactgccgcgcattccggcaacaccatcaactttttctgcagcaatacccaaaataacttctagaacacttggatcaattttaatttgctcgctgttttcttcaccacttaaaagaatttttgaactatctgccattttgttacctcaaataaactacttatttgcacgtgatacgtaagtaccatcagcagtgttaatagttaaaacgtcaccttcgttaatgaagaatggtacgttaactactaaaccagtttccatagtagctggcttaccaccacctgatgaagtatcacccttgatgttaggttcagtcttagcaaccttcaaatcaaccgtattaggcaattggatacctaaagtttcaccttcgtgcataactacgttaacaatcatgttttccaataagtaattagcttcatcgccaatttgttcatttggaattgctaattgatcgtaagtagaagtatccatgaatacataacttgagccatcattgtacaagtattgcattgacttagtttgaatgtctgcagtttcaaccttagcagttgaacggaaagtatattcttgtacagcaccagttctcaaactcttaagctttgaacgtacaaaggcactacccttacctggttttacgtgttggaattcaacaatgcgccataaatcgttgttgtattgaatagtcaagccattcttgaattcgtttactgaaatcattgtcatattaagtccctcatttctacaattattatcttaccaatcttgaagcgtttttaccataaatacgataaattaaatagctattatagggaaatcaattcatcctttggcaaagtggataaagtttcaggcgtttgatcatggaccaaaatatcgtcttcgattctaacaccgcccttgtctggcaagtagattcctggttctacggtatgaaccatattattgaccaatttagtagttctaaaaggtaaagctggttgacacaattcgtgaatttcaagaccaatgccgtgaccgatcccgtgtccaaaatactgaccgtaaccttgttctgtaatataatcacgtgctgctttatcaacatcatatccagtattacctgcaactgccgcggcaatgccacggcgttgtgcttcatgtacaatatcatagattttatgcatttcagcatcaacttcacctaatgaaacagttctagtaatatctgccgcataaccgtgataaaaactaccaaagtcaatgacaatcatatcgccttcggacaattctttgtcactagcaacgccatgagcccaagccgaacgcacaccggaagctacaattgtatcgaaatcagggccatcgccgccattaactttaaataggtagtccaatttagcaccaattgcacgttctttaaagctttccattgaaatatcaattgctttgcgcaatgccgcaatttcaagatcatctttaatattacgtactcgttcaaccaattcttcaaccatcacaaattcaagttctggatttagttgcttaagtttttcatattcactcgctgaaacgaattcaccttcaactaagaccctcttgacgtccatttttttcaaggccttagtaagttcttcataatcactagaatgtttcattacaacatccatttcgccaggtgcttgtgctttaatctgtccagcaaaacgagaatctgataaaagtactcgttcgccactagcagtcaaaattaattgtgcttcttcccctgtaaaattggttagatatcgataattagcttgattaaaaataatcaatgcatctgcatttgcttctttaattaaatcagttacatgctcaattcgctggttaattaaggataataattcttgcctattttccatctcagagaccctctttttgtatgatattggtttaattatacatgtttctgggcggaaaaagccataaaaaaagacgggtggcttatgctactcgccttttcatgttaatctctgaattacttagcttcttcagctgggtatacagaaacttgcttcttgtacttgccaagacgttcaaatttaacaacgccgttaacaagtgcaaataaagtgtcgtctccaccttgacctacgttcttgcctgggtgaaccttagtaccacgttgacggtaaataatagtacctgcgtgaatagtttgaccgtcaccagccttggcgcctaaacgacgaccagctgagttacgaccgttggcagtagaaccaccacccttgtggtgagcgtataatttcatacctaaaatgttcatattcatttcacctctgaattaagcttcaatcttttcaactgtaaccttagtgtaaggttgacggtgaccatacttgctgtgtgagtgcttcttaggcttgtacttgaaagttacaactttcttttccttgccttgcttttcaactttagcagttaccttagcaccatctactaatggagtaccaaccttaacgtcgtcgccattagcaacaaggataacttcgtcaaaagttactgagctaccttcttcagcatcaagcttttctacaaatacgctatcgccttctgcaactttgtattgcttaccaccggtcttaataattgcgtacatttgtacacctccgaaaaaaatacttagactcgccgaactggggtgcttcttacataagaagacttctaacctcaagccgtgcggttgcagatgtggaggtctccacaaatacaactcttatatcatacaacgcttttagactaagatcaattatttttttacattcgccattgaccgccatgcacttttgcaacattttcggtaatgataaacgcatcctgatcgatctcatgtactttagaaataagtggcccatattcacgtggatcaactacgattaataattgacgcttgctttcgtcgctatatccacctataacatcataaatcgtcaggccttgataatcttctttaagcatatcttgaattcggtctaaatctgaattactcataattctgacttgatactttttatcaaaaccggtctccgcgtagcgcatcgtaatggcagttaccacttgagaaaatgctgctaagaagaaagcattccaaccatcgacaaaaatgttcaagaaaataattaccatatcaatgcataaaagcgtagttgcaggatttaaataaaaatatttcttcagaatcatcggcggaattgttgtcccaccacttgaggcattaacgcgataaagtagcgaaactccaagtcccattaatgcaccaccataaattacggctagtaggtcattattcactgctttaaagctaggcgtaacttccatcaaaactggtaagagcaaactacctaatgcaatattttgggtagtctttttgcctaaaaagattgccgccaaaatcagcatcaagccattcactacaaatactgtaattgatcgattaatcccccagaccgcatcgactagaatagaaatacccgttgagccaccagctgcaatattaatcggtccataaaaaagattgattgatattgcgattatttcaagtcctgctaaaaataccaaccatctcatccaggaacgttgtttaatgtttttcattattaagcgtcctttcttttagttagtactattttaacgaaaaatcatctgttagctcaagcaaacaaaataatgttaacaaattatttatttttaacttctttataatcgattgattgcgttccttcataagcaggtaaaccattttcagctcgatataatgctcgctcaaaagagcggtagcctttagatgaagaaacggcaaatttaacaccatactttgaagcgaattcctgaatattccaagtagcatcatgagcagcataagctgtcatcaagattacaatatctaagtctttgatttgccgttccattaccttcttcttgccttcaaaagcatctattggaattgggatcccattatagcgcgaaacaatcccttctaatattccttcattttgattatcaccaatcgcaattcccacccgctgatagtgcaaattcatgtcgagtttagttaactcttctgtttcttctttctttgacttatttttcttttgatacgacagatctgatttcttaggcggatcaacttgataaatccaacgaatctgtactgcctcagcaggatttttcttaatgcgaacatcacccgtataccaagctagatctacaattgaaccatcttcaacatgaatattttcaccttgataataacttgaatcaaccggaatcgtgatatccttaccgcgaattctcaacttttcgcccttaatatttctagtgatagctaattgattggccttgccgcggaccacagcataccggaattcttcgattgggtcataatcacgcatgcgcaatttgcgataacccaccacgcgcaagacttctgcttcataatttggattatctcgattttcaatagcttcaactatgtcaccgctctttaaattcaaagagtgaatttgtgattctttaatacggtaaacaatttgaccactatcattaatcaaattacagcctgataaagcccgaataacagtatagcggcgtcctttacgataatcgcgcttaggttgctctttgggcttcattgcttcttcaaaaattttcttgttaacagcttctttagttgtcttagatttttgaattgcctgatccaatttacccaaaacattgccatagcgcttgccaacgcctggaacaaacgtcaacttgtgtaaagcatcaagtgaactctttttagctttttcatcacctggagtctcaattaaggctgtcagcccaatcaataattgcttaatttgctttaaatctgcatttctttgtgcaattgattgtgtatttgcaattttattcttaggttgagttactgatttagtctcagatttttcagctgtattatcttcggccatatttaggatagctttaatcgcacttaaactattttcgagacttttatcatcagcctcagttttatttaaaattattttgatattatttcgataatcatacattattctcaccacttttattgtataacttactaatagtaacgaacataattatactgatttttatgaagtagtgttaattgattgatcgttttagtgattaaatttttttacgcaaaaagcagacaatctttatattgcctgcttcctaatttttctatttatcgagttctaagccaattgaaccaattagcgaaattttcacctgctgtaacacgatgaaccaatacaatacctactgcttttaccggctgactttgcgcagcagcaattggaaatgcagtagagagagcaacagtcagtgcagttgcagaaattgcaattttcttttttaaattcatttcaaatcctcctcgtaaatatctagacatcaacatcattatattacgtgggattctaaataaataattcatttatgcacacatagctttaaggctctaatacaagtttatatatttaactatataaaaaggcgactcacaatcgagtcgccttttactacaatttctaattattaagctctccactcgccgccttggccataagtatgcttacctaattcgttgataattacatgaatgtgttccttaggcgcaccagtattcttgtgcactgcttcagtaacatccttcattaagttagtaatctgctcatctgagcgacctttaattaattcaatatgtacaaatggcataatttagccctccttttttagtttaattatagtataaaaatttctcactaaaaagcaccaccgccgctgccaccaccaaagccgccagacgatccacctgaaaatccacctgagcttccggaaactgaagataaaccagtagacacgcctgaagagaagctacgttcaaaactatgctcaaaactgtcactactgctactatagaatccactataaaacagaactggtgcagcatctaattcatctgcaaattcaatcttaagctgcttcaatacctttttggatagaccaaacgctacagcatacggcataatgtcttcccataaaatcagatcaccgacgtctttcatcttgaattgaccaatatcgtctagcattttcttaaagcagcgaacttgatctgtctcaagtgcacctttttgggtataaatacttaaacgagaattgcccactatgaatgcagcaacttctaagacgatcatcatgattccaattattatcacaaaactgggtatattatttgccatcattaagctaattacccagatcgcaaagctagcaatcattcccatgagcatccccgttcggaagttgctacgctgctttttatattttttatcaagcaagtccttatcctcaacttgcttatattgcccgtcacaccatttatcaaaacgcctacccaattttttagaagtataatcccgcaaatctttcgttgtaaatgacttaccatcaccaactttgttaaaaataaaatctaataggtcatcagtcaaaacactatcatctactaaagtaattcgataattagtccgctttaaatgtttagtttgatatttttcgatcttaattttatttttaccggctaattgcatcaaataagctgtaaatgctttaacatttggtttatcagcttcatccaaaatttgcgcagcagtaggtgatatatctggaatttcataattatgtactaaatcgcgctctatttttggcttaaccccaacttttttaataaaaaagcctctaattatcaccacaaaaccgacaagtactgaaatgatcatcaatcctatactaagcatctgcttacgctgacgcttctgattagcttcttttgctaatgctgcttcttgtttttcaattgctcttttcttattttctttaacaatattctgattagcactagttaccgtagttggaaaaatcgcatgtacttcgacaccactatctcctgcaacatcatcagcagtcataataattttgccctcttttggcaaaacctgagtgtaaccacttagtggcccatgagcccaagcttttagccccttaactgccccaggaaaaatcacttcagcacgcacatgatctaagtcagtatcccaaccattaccaactattttaaagttcagctcagctgtatcaagataattagtaattgcccggtgaattagataagaatactcaactttaaccttatcattttccttaattcgatgataaaccttaaaattataagaattgccctgcttttgcaatttatacgtattatttttgcccgttgttgcggcctttatattttgtccatcgaccttaacctgaatgttgctcaacttctgttttacagccagattttgcttataataaaggccacgagcatcactatcaaatgaatacttaattgttcgatacattgtcagtgaaccatctttattaactcttgctatggctctaacattatcaatatcataatcaacatcagctctaacgctttgaccccaaatagcaaaaacgctcaataggcttaataaagccaataaaccaaggtatttcttcttcattatttatttcccatttttctgcaaaaatttatcaattaaagtatctgctcgactatgatatttacctttaaaatcatgacctgcacccttaaataagtataatttcgagtgcttaaattttttattagccataattgaataagaatctggaataatcatgtcacttgtaccatgcattattaaaactggaccatgatacttagttgcttcttttaacaagttatacttgaacaagttttcaaaataggccttaccaattgtgaagccaaataggttgagcttgtctggcacttgtttttctgatttaaaagccgctttcgcataatcagtgatcgaaaaggcagggtaaagcaaaatcaatgactttacttcttgcggatatttacttgcgagcattgcggcaactgctccaccttgactctcgcctagcaaagacacttgtttacggtcaacatcagtcctatttttaattgtatttaataccagctgtagattcttttcttctgtaaaaattgacatctttaattgatctacaccactactttgaccattcttagctccaccaggaaaatcaaaagtataggcaacatagccacaactagctaaatatttagcataactggttagatcacggtaatttcctgccaatccgtgagccaaaattactgctttcttcttaccagctaaaccctgtggtagatatatatgaccataaatatcaacgccatcttgttgaattcgcaaaacttggtctatcacttgatacttagcctgtttttccttagattgctgtttatcgactttaaccgttttaactgacgacttagccttcttaggcgtagtactttttatagtacaacccgttaaagtcagtagcatcaatattattgctataaatctttttttcaagtttatttcatccctatcagttaattaattcaggcgtttcctgaatacttttaattatacaaaaaacggcatgaaaaaaggaattaaacctttaagcttaattccttcttgataaattcaattttttaattaaaagttagccgccttaacgtacatgttacgtccgattcggtaacagcttttaccattaacgcgcatccgtgaaccataggtcttaattggcgtaccttttctaagcactctccagttagcgcggtttcccttgttattatatacataagcattgtgcttaagtacacgtgaattacctaaaacattacttgccataatgtaacgaccattgcccatgtttaaggcagtcttaccattatcaagagtcactacaccataatgagtaatattagtataagctgcatagtagccgctttgacgctcaccctttttattatagatatatgatttcttcatcacatagccagcagttgctgaacccttatcatcatctgatgaagtactcttattcgaagtatttgatgaagcatttgaagagctagcagaattggtgttgctggtagctggagcttgtgaaattgcgccattgttggaagttacattaccgtcaattgataatggtaaaacagcaatatttccatcaacgcttaatcccttccaattatcagtaaattgccaaattgaaacgccattcattgatgggaagtaattgaagtttggactatcaattctacctgaaatagcgtatgaagcgacccacaatgagttaggatacttggcaattacactattagtatcaatattattttgtaaaactgatgaactagcataaagaagtggcttatagcctgcattttttatagtgtccataaaagcaataattgcattagccgttggcgttttaccaccgtaaatgttattgcccgaacctgtttcataatcacaagcaatatatgaacctttaggtaagccgaatgcttgggcagcttgaactgcataatttgcttctgcagcagcagcacttgcatttgaactaaaagtagcaaagtgatatgccattggcatcatattatttgataaagccgttgaaatttgacttgatgccttagggttacgataggaagtaccttcgctaactttaacaattgcaaattgtgctccagcttgcgcatgacttgacaagtcagcgttttgataactagcaacatcaactccaagtgcgcgggctgcaacagaggtagttgcagcgttcacaactgcagtttgtggtatatttacttgtgtcagcgctacccctgccgtaccaagaacagtcgcgcatgccaatctaacaatgatttttttggttgtagtcaatcttaattcctccgataatgttaaaaatagttgtcgttcacacttgtcgatcctattttttggaaatcaattttagaataagctcgttccaaactttagtcaactgattcactaataatgtaagattaagttaataattgtcatatatttgtatcatacaatatcaaatgtaaaaaaatattgtctttgtagtaaaatttagcacatagatacctaaggtatgtaaaaagcctgtaagaccaatgcttacaggcataatttatgatccgggtgagattcgaacccacgacccacagtttagaagactgttgctctatccagctgagctaccagaccatcttgtatgtttgtacgtcctcaacagaacatagactattatagggaaacgttaattaaaatgcaagaggatttttcaaaaaagtttttattttttcaaattcaattaaagtataattgagttaacatagataattattagaaaagagaacaattatggaacttaaagataaaatcaaaaagtttgttactgactttagagatggtgcatatcagcatgacaccaaacgtgacagtggcttgcctcacgacatccctgaagttgaacgtcttgataatctgccttatggtccagatgaaaagtggcatactttagatgtttatttacccaaaaagcacgaagctcccttccctgtcatcatcaatattcacggcggtggttgggtttatggtactaaagaaatctaccaatattatggaatgggtttagctaagcgcggttttgctttcatcaatcccaactatcgtcttgcaccagaaaacgcggaattccctgatgaattagacgatgttgatcgctacatgcattgggttgatgagcacgctgaagaatatcgtctagatcgcaacaacgtttttatcgttggcgacagcgccggtggtcaaatggctgagcagtatgtcactattttgactaatccagattatgccaagttattttcttacaaaccattgaacttaaaatttagggctgtcggcttgaattgtgctgcttccttcatgttaaccccaagcaatttagatggcatggctagcgcctacttcactaaaaatgcagttaacaagtatcatgaacaactcgatgttgaaaaatatatcaatcataatttcctaccaacttttttgattactgccaacaaagatttcttacatgacatgcaatttaccctgtttggcttcttactcggccgcggcgttcatgctatttgcaaatcttatggcgatgaggaaaatccacgtggtcatgttttctttgttgatcaaaaagatgaattagctgacatcgcaaatgatgaagaaattgaattttttagaaaatttttacaaaaataaggacggaaaataatgattaaattttatggttataaacgttgctctacctcacgtaaagcacgcaagtggatggatgaccatcaggtcaactacgaatttcaagatttagttgaacagccaccaaaaaaagaagacttggtaaaatggatgaccaaatatcaagatcgtggtctaaaatatttcttcaatacacacggtcaagattaccgcagagaaaatttgaaagaaaaagtgccaacaatgacgattgaagaagctgcagatatgatgtcaaaaaatggtaagttaatcaagcggccattagtcgttgatgacagtaatttaacttgcggttttaaagaagatattttcgaacaaatttggctataataaaacaagcccataacctgtaactttgtggttatgagcttgtttttatttctttaaatgaatttcacgatcaaacaattgatgcatttcttgattaaagttgtgagcaatgaatacaatcgttgcatccgtcttagtcaactgacgcaaaattttcatcgtagccgcctgatcaattgcacttgttgcctcatcaatcaaaatcaacttactctggtgtaccatgcttctagctaaaacaattttctgcctctgaccaccagaaacattcaattgatcaaggccaatcttagtctcaatgccggccgaaaacttagcaatatctcctgcaaattgaactttttcaatggctgatttaactcgacttagcaattttgaattgaacatcgtaatattttcaacaatcgttactgggaataacactggatcttgcggcaaatagccaatttcagctaaatcaggttgaatcttttcacccttttgattaaagtattgaatcttgccgcgactggcttgcaattcacctaaaatcaatttgagtaaagttgattttcctgtacctgaatcacctgttagtaaaattttctctccagctttaacttggaaatctgggaaagtcacggcctcaccgtttctaaaatcgatagctaaattatggattgaaaaactaaccgcttgttctaaattacttttctgttcagactgaattttctttttagctacaaaaatctcttctcgcaatttctttgttgctcgcattcttccaccataattagcaactccttgcaaagaaccaaatagtgctccattgaagttgccaatgctggcaatcaaaccaaaagcagcccaattatttactaccaaaaatccagttaaaagaaagattagcacatctcctaatgaataagccaattgattcagataatctaattcctgatctactttttccttctcaatatttgctgcttccaagcgtcctgaattttcagcaatagtcttaaaaagcttatcgctagccaaatagcgacgaacttctgataagccaattaaccaatcacctaaagtcttcaaatactttcgattagctactgataccttttcagtagctttttgtaatggcttatccagtaatttaggtaaataaatctgaattgcggcaaaaattaaacaagcaactaacaaactccactgaaaagtcaccaagctaaaggctacaccgacaataccggctagcatccctactacatagcggaacgaatctaaatagtcattatgtaacagtttcaaatcattagtcatccgattttgcactgcactaaccgcatgcttttgactatcggcaaaataatgatctgttagttcttgccgaattaaatgcaggtaattttgaatcaacttttgccaaatgattcccgccaaattatagaataagaataccatgacatagctagacagctggattaatgtccaagttaaaaataaactcaagtttctatttttggcagcatcaaattgcaaagttaacacataatctacaactacttcgccaactgctgcaataatctgtagtcccatagccagacagaatttaattggattaagtttaaataattctttgctactcattattttccctccaagtgaacttcacgatcaaacaatgctcgttgttctacggttaaattgtgtgcaacggccaaaattgttgctctactttgcattaagttttggaagatttttgtcgttgcttgttgatcaattgcactagttgcttcatctaagtacagaatcggcttctcatgcaacaacgcccgcattaaaactaccttttgtttctgtccaccagacagcaattcctgttgtggatcaagctgtgtctctatcccatttttcaaacgcgcttgatcactatcaaaaaccgtcttatgaatcacttgtacagtttttttattaagcttaggcttaaacatagtaatattttcttgaatactgccaggaaagatcaataagtcctgtgccaaataacctaattgacgtaaatcaggtttgatcttttttcctgttttatcgcaatagattacttcacccgtacttggcttaatttgccctaacaaaacttttaataaagttgattttcctgtacctgaatcaccagtcaatacaaccttttcaccattcttcagttcaaagtcaggataagtaattctttcaccatttggatattgtactgacaagctttttatttgaacggtagcgatttgttttaaagaatcataccctttttctggtaaacacttttgcaatttagccagatcatcccgcaaagttttcgttgattttaattgcgtatatctgttcacgcaactatctacactataaaaaattccattggcaaaatatcccgctgtcagaatcgctcctaaatttacctgatgattgaaaaacaaaattccagcaataaatggaacaccaacacgaccagctatattaaatatcgcagacactaagctagtataatgtagcaatttatctcgctgatattcactctgctctagtttctgactctgttgtcccaccacctttttcaaaacaactttattctggtagcgtcgcagctcatctaaacccttgaaccatttttctaacaactgcaaaaattgcttattttggatagaaacagctttagttgctcgattggtatatttttcagtcaatttcggcactactactgcaagcaaagtaactaataatgtatagacaaccaatatccaatgaaaggtaaacagcgtaccaatagttaaaataatataaattaagtcacaaacaaaatagaagtaaacattatagtaactctcttgcactaactgcaagtcatttcccaaatgattttccatctctgagactttgtcttcaggctgctgataataatgtcgtataattcgctgtcttacctgatgaaaaagtgtctgtgtttgtttggtattttgtaaacttccccaattaaaactgacattgcagacctgtccaattaaaaattgtacaaagattaattccaaaaacagttcgaatttaccacttgcaattgcatttaactgcggactagttaagtaggtgtacattgtagttgtcagttgcgttagcgtaatcaaaaacagaactaacattgcccgctgacggttagctttaatataatctcttaaacccattattttcttcattcttttttgacaaaaacgtataatcagcaaaaaaatctctaacatgatttgtcgcaaagaaaaagcactgttctggatgctcacatcctattaacagtgcaacaaataaaggttgatttcgataaagaaaaccaccctcaattcatctactgctaatacttggtatgcaagcaaaaaatgggtgcactaaacaaggtgcaaagacagtattttgctaaacaacaaatcaaatattagagattcagtaaacgaatcatatggcaatttcctctatttctataagttaattaaaactatatcatattaatttaattttacaagctattttttatcttcagctaaatatttttgcaaaactttgaaaacaccgttctccgtattggccggtgcaatatatttcgcctgcttttttaccttgtccataccgtttgccattgcataagaatatttggcaaatttcaacatatcgatgtcattacccccatcgccaaaggcaatcaggtcatcccctgtcatccccatcttttctaggagatgctttaatccggcgcctttattaacaccttgtgtgttaacatcaatggcaaaagtagcggaagcaaaagcagaaatctggttatcgtgcttagaattaaaatctcgttcaatttctgcagccttagaactgtccattccaaatgtgatctgataaatcttatctggtaagtcattccagtcattaattacagtgctattaccagcaaagtaagcaaaaaagtcgcgttcatctttttcaacattgctatgcaaatatgcaatatctcggccaaaaaccatcgtagccatttcaccatatttcacatgtacatcatgaattagctttaaaacgtcatcgcgattaagcaaataactgccagcttcttgacccttgatgattaatctcgagccattcaaagttacgaaatccattctgctggcaaacttgccaaagtcctgcttcaatctaacataaggacgccctgaagccacgataaaatgtactcctcgttgttcaaattcagtcaaaatttgatcaaattccttgtgattaaactgcttacgatcatctaaaaacgtgccgtccatatctacagcaactgccttaaatggtaaagtcattttttcaccccatcattattctattttttccaaaaataatcttatcatttttgagcatcctatttcatccgtaatctaccacgttttagtacaaaatagctaattgttaatagaacagtgctggtaagaagaaaaataaaattatcactccaaaaataatgccaacctatttttgttaaaatatctggcgttaaaatttcttctactgttgcatagatataaaaaacagcaaaaaccgatgcaattaaatagcctactccagctaatgagtaaaaaattatgctaatccattttttagtcaccataactcggtttcctagccaaacgaataaaatagccgtcactaatggcaaaacataataataccagaatcccataactatccccctgattaattttggctcattatcacatgcaaaagtaaaaaaacggtaaagaagactttaattttgggcaaaaaaagaccagctcacttcagagctagtcttatctattctattaaactaacttaacgtgcttagcatgcctgttcttgagcttagcccaaccatcgaaaaacaatgccccaaaaagcaaaatcataataattcctgccaaaataatggcattagtcgaattagcaactgctaaactttgggctgaatcaaaatcagcaacttcgtccatttggataatcaatcctgaaaacaacatggctaagccgttcaatgttagcaagccacacagaattgttaagattttagtctttaatagcttcataaaaccatgccctttctttattaattagatgaatattatacacgcattattttataattcaagtaattggattaagaaaaggcacaaaaaatagacatacgttcgcatgcctattactaactttatttattccacaggaatttgattaatactttatctacttttggattctcatgcaacttggagtgacgtgcattttttccagtaaacttcactacctgatagcttttagcacgatctgccactaaatactttaatgacaaagatgatacattgggtactgttccatcggtttgaccaccaatatcaccaatgatgtttaaaacacgaactttatttttcggatatgtttctcttacacccgtcatttgccaatagctagaattcattttgttcggttttccggcagaattcaattttaaacctttaggttgacgaattgaggcgggaacacggctaaagttcaaaccagcaaaatgtcctgccatgccgacttgcttgactaattgtggcatcttccggttacgtccattttgcagcatataataaatgatcgaaatatttcctaaagaatggttcattttttaataccataacgcttttgcagagccttcactacattagtggcgtaaacaccatgtcgagaaaagttcaactcacggttattttcataattgacttctgcaattggatttttggcaccttttttccaacttccactcaaagaaaccttaccgttaggcgccacctcagctctaatcactgagttcgtgactccagctttctcagctgctgccaccatgtgttcttcagtatgatatgacgaaccacaccgtggaaaaataatgtcggtgttgaggtgattttagtctgacttttagtatgatcaaccttattctgattagtacaagctgtcagcgaaattgtaaatatcgttgtaagtagcaagacaagtgaaaacttttttctcatttagcatcccccatttgtttaagttcattttaaagaaaagaataccaaaataaaaatatttttcgcttattaacttccatatctattggttatagccacaattaaaagtaaaatagaaagtaattaaactgcaaaggagaaaaatatgaaatataaccaatacgcttatgtcgaaactgacttcgatcaacaagtaaaagaattaatcgacatcaatttcttacctaaaaattatgcagactggaattttaacgatttgctgggcaagctcgttaaaatgacaattgctgaagcaaaaactgacgctgctaagacaacaaaattatctgaatttgctgtttcaaatgagcaaactttagctgactttttaaaaggaaagcctgaatcaattggtactgctcaattctataatgtagccttacaattacttggctatcatgttcattatgactacgaattagtcgatccaactggctttatgcaaaagaatgctttaccttttgtccaagacatttctgatgtcaaaaagttaatctctgctttttatcgtttgctcaatactcgcgccaaaaacggtcaaattttgctcgatgtaatggctggtaaggggtactttactcaattctggggacaaaataagtttaaatttttcaatggcaaagctattcctgtcttcgataccaacaaagtaattcgtgaagttgtttacgttgaaactgatcttgatactgatcatgatggtaagagtgacttgattcaagttactgttttccgaccagctgaaactaacaaaggcttaaaagtgcctgccctttatactgcttcaccatatttcggcggaattatcgctaatgaaaagcgtaaccataatgttgatgaaaatttatctgatgccgccgattggaatgatccacaatatgttcatgcaccaatagttaaagcaaagcagccagacgactctaaccacccagctaccgaagaagcagtacataaatcttcttatccattaaatgagtatatgcttgctcgtggttttgccagtgtttttgctggagcaatcggtacccgtggtagtgatggggttcgtattactggtgcacctgaagaaactgaatcagctgctgcagttatcgaatggctccacggcgatcgtattgcttacactgaccgtactagatctgttcaaaccaaagctgactggtgcaatggcaatatcgggatgactggtcgttcatatttaggcactttgcaaattgctattgccactactggggttaaaggtttgaaaactgtggtttctgaagctgctatttcttcttggtatgactattaccgtgaacacggtttggtaatcgcacccgaagcctgccaaggtgaagaccttgatttactggctgaaacttgtcaatcaaacttgtgggatgcaggttcttacttgaagatcaaaccggaatacgacaagatgcaaaaagagcttttaacaaaagaagaccgtgaaaccggtcaatattccaacttttgggaagcaagaaactaccgccatcacgctgacggcatcaaatgttcttggatttctgttcacggtttaaatgactggaacgttaagccaaagaatgtttataaaatttggcaactagtcaaaaaaatgccaatgaagcatcatcttttcctacaccaaggtcctcactacaatatgaacaactttgtttctattgattttactgacttaatgaacctttggtttgtacatgaattactagggattgaaaacaatgcttacaagcaatggccaaccgtcatgatccaggacaacttgcaagctgacaagtggcacgaagaaaaggattggtcaaatgaattaggtcaaaagaagacctactacccaactgatgacggcgagcttttccaagatggcaatggcaatgcacaacaatcatttgtcgatgaaggtggcattgaatttaagaaggctgacatctcagaaagcgactggctatacaagttcatctgtggtgatgaaaaatgggctaaaccaagtttgcgttttgaaacagacgaatttattcacccaactacgattgtcggtcgtcctgaagtaaaagttagagttaaaggcagcttacctaagggacaaatttctgttgctttagttgaattgggagaaagaagacgcttaaccgctacacctaagttcttaatgcgcggcggtcaagaacttggctatagatttggcactgatactttgcaagaatttgtgccggacaagaagactaaggctaagttgatcactaagggtcacatgaacttacaaaactataaggacatgaaaagacctgagaagattgatgctgacaagttctacgatttagacttcttgcttcaacctacctactacactcttccatctggtagtaagttggccttgatcatctactcaactgatgaaggaatgactaaacgaccacttgaagaagaaacttatacagttgatttggccaatactgaaattaagttctatgagaaataattttttattcaaatattttcttatattcaccatagccagcctgttccaactgatcatatggaataaatctcaatgctgcggaattaatgcagtaacgtaaaccaccttgatccactgggccgtcagtaaaaacatgacctaagtgagaatcagcttcgggacttttaacttctgttctctccattccgtgcgattgatcgcggtggtaagttaatttcttaattggcttagtaaaactaggccaaccacagcctgcattatacttatctaagcttgaaaaaagtggctcacctgacactacatcaacgtaaatccccttttcataaaaatcatcatattttccggtaaaaggatattctgtagcagccttttgagttacgttatattcctcatcagttagccgctttaaagcttgctctttttcttctttgttaaaagtcatcggatcattcctttgctaaatatgttcagtagtacttggaaagaaattatctattttcttttcataaatatcaaatttatattttgtcaaaaattgatttgatggatcatatattctaacctgaagcatctcatttttgccattcatatgcacttctttatttgaaacttccaaaaatggcttaaatgcagcaatcagattttgataagaactataaacatgcacattatgttcgacaatttctccattacgtgcataccgacgaccgtcgatcacgtatactgtattatcactcatagaaatcatcctctctttggcttctacttatattttaattcattttatatttattcatgacttttttactcaaaaactccaacaattatcatgttggagttcattcaatatttatttaaaattcattaaaatactgaggtcaaaactgcaccggcaacaattaatattaaaccgatcacagtataaataagacctttttgtgtcttcttttcgtgtaagaaaaggataccaccaagagtagaaataacaacacaaagttgtgacataacaaaggctaggtttacaccgttcatcttaactgaaacaatgtatgcaagagcagcaattgcgtaaatcacaccggcaggaattacttgataactttctttttccttaaagacttgtgtttgcttagttgcaattaaataaacaattgctgcaaccaacattccaatggtttcagcaaagaaaatcattacgctgtcacccttcaaggcctttggaatggaacttgaagtaatgtaaccaagtgtagtcaataccagcacaatcattgtagtggtctgattcttttttccaccctcagatgtacctttgtcagtcaatgatgtaaatgctacaccaataattaaagctaagatccctaaaaatccaaacaatttagcttgagtgcttgcccattcaccaaagatcaacacacctacaagtggcactccgatcaactgcaaaccagttgaaattggcatagtttcagaaaccccaaccttggaataactgtaatactgaccaacttgaccaataacccaagcagcaccagctaacattgctaaaataaaagtagtcgcattaaaagatggacgcttaatgagagtaactgcagcaccaaagataaatgcaccaataacggtacctaaaatttggtggtaaatgttactcttcttgacaccagcaacaaacatgggcataagaccccatcctattgccggaataaacagaaataaataactcattcgttttgtctcccttattaatgtaaaaaagttacaaaaagcattctatcaacgaaagcgcttttaatgcaagcgatttactattaatggatgacaagtgcaaatcaatatatatcagaacaccaagagttatttaaattatttttataaaaatcctacggcaaagcctattccatataggaatatacaaattattcccaaatacaataagcaccatttagccacttgcttcaaaattattgattcagatccatcttgtccaattgcagctgaagcaacagctatactctgaggtgagatcatctttccagcagttgctcccaccatatttgaaccaactacccaattactatttacgcctaaagccttagctgaagacaattgcaggttaccaaaaagaacattagctgaggtatcagatcctgtaataaacgtaccccaagcaccaattaacggtgcaactaatggatatattggtcccattagaactactaatgctgccgcaattgctgaagtcattcctgcgtagcccattaccttggctaaagccacaatagaacaaattgtaattaatgttttccacaatccaaaaattgttgattttaagatttgtcctaatttcttgaaactaactttttgaattaatccaccaataaaagtagctagcaaaattaatgttcctggtgaagaaagccaattaatcttaaacagttctgtatctttcccagtatataccttaatataagaagtcacttttcccaatagatgctgaatatctggaaacagtgatgaagcaagaaccacaaatacgaacactaaaataaatggtgaacttgcacgcaaaatttcgatagcgctgtgcttctcaatattctcttttatgtcattatcttgatgatgatataattttgccatcagaactgtagtcaaaatacaacaaattgaaccaacaattgctggtaactctggaccaacaaattttgctaccaaaatttgcggaattgaaaatgacaaaccagacatcagggtaattaatcccactcctttgatagctttaactccgccacctgttagaatcaccaataaaaacggaattataataattaataatgcaagttgtaaagtaataacaaatgataatggagtaacgggcaaattagttacgtcactcagtgtaatcactggtaatccaattgcaccaaaggcagttggtgtagtattagcaattaaacaaattacggcggcattaatcggattaagaccaaatccaattaatatcccagcgggaattgcaactgctgtcccaaaacctgcaattgcttctaagaatccgccaaatccccatgcgataatcaaaactaaaatacgctgatcagtagtgattgacgacaaagtatcttgaataattttaattccacctgaataattgcttacattataagtaaacagtgcagccacgattacataaacaattggccatagccccatcagaatgccctctaaagcacccgtcaaagtgtcaactatagagaggttaaatcccagtatagccaatacgatagtaattaatagtccaatgctgcatgctttaatagcaggcgtttttcgaattgccaaagagtaaataagccaaataattggaattaaagccaataaaaacgaaatccacatttttattcccccctaaacacttcacttccttatctcagattataaatgtattcgcttacgaaagatagtgaaatactcttactcatggctctataataaagtttgtgatacatatttttttcacaatatcttgattgaatgctatctatcgtttatttatctcagaattattagctcacttgtgaaaataattttttgcataaaaaataatgcattctcctacttcaatagagaaatgcattatttttatctattcaactatcctacttcaaagcatcagtagcaaatgatctattctccaagctagtaagcaaagcatctgcagtatcaagtgctgtaattaatggtacattttgaccaatggcaacctgtctaatgatgaagccatcagaattcttttcaatatcgtgacccatcgtattgataaccaagtcaatcttgccatttcttaattcattcaagatattatccttggcgtcttcatcttcatgcactttagttactggatcaacatgcaaattatgactgcgcaagaaatcagctgtacccttagtagcaaagattctgtagccaatccgcgcaaatctcttggcaattggtaaaatcttttctttgtctcgatcttcgatggtaagtaatacattaccattttcaggcaattgcatcttagcacctgcaaaagctttgtagagagctttggcaaaagtgtgatcactccccattacttcacctgtcgatttcatttctggcccgagatatgcatcaacgtccgataatttgctgaaggagaagactggtgctttaacagagatcatgtctggctctggggcaagaccatcaccgtagccctgttcagccaaactttcgcccataattactcgggtagcgacctgagccatttcaatacccgtgatcttgcttaaaaatggcactgttctacttgcccgagggttaacttcaattacgtaaacttcaccatctctgacaatgaattgaatgttcataatgccgacacagttcaaagtcaaagcaagctttctagtgacatcagtaatcttttctttaacttcatcagagaaggtttgtggtggataaacagccattgagtcaccagagtggacaccggcatgctcaatatgttccatgattcctggcaaaagaacttccttaccatcactaattgcatcaacatcacattcacgaccatcaagataatcatcaaccaagattgggtggtctgctgcaatatcaacgtggtcttgcaagtattcttctaactctcccttggtgtagacaatttccatcgccttaccacccaaaacataacttggacggactaaaactggatagcctagcttatcagcagcttcaagtacgccttcatgagtagttgcagttaaaccttgaggctgattcaaatgaagttgcttaatgatttgatcaaacagttcacggtcttctgcacggttaacatcagctactttagtgcctaaaatcttgacgccatgttcttctaagccatgagccaaattgattgaggtttgaccaccaaattgaacaatcacgccttctggcttttccaagtcgcagacattcaagacatcttccaaagttaatggttcaaagtataatttatctgagatagagaagtcagttgaaacagtttcaggattagaattgataacaattgcttcgtagcccatcttttgcaaggccttgacacagtgaacagtcgcataatcgaattcaacaccttgaccgattctgattggacctgagccaataacgatcaccgacttcttaccagtcttatgtgattcattttcagcatcataagttgaataaaagtatggtgtctttgattcaaactcagcagcacatgtatcaaccatcttgtagactgggatgatgccatgctttttccgaaatgctcttacctcatctgcagtttcattccacaaagaggcaatcgttggatcactaaagccatatttcttagctaagcgcaatacatcaacatcatctttattttcctcaagtgtcttttccaattcaaccatatgttgcacgatatctaaaaagtagaaattaatcttcgttaattcatgaacatcttcagctgaataaccacgtctaaatgcctcagctaaatagaagagacgatcatcttgagctttgactaatttttgctctaattggtcatcactagctacgtgtgcttctggtgagtaaagatctttttcatcaatttctagtgatcttaccgctttttgcatagcttcttctgcagtacggccaattgccataacttcaccggttgctttcatttgggtgcccaaaacgcgatcagccttagggaacttatcaaatggccagcgtggtatcttgcagactacatagtctaatgcaggttcaaattctgcataggttgttcccgttactgggttcttaatttcatccaaagtcattcctactgcaattttagcagccatcttagcaattggataaccagttgccttagaagctaaagcagatgatcttgaaacacgcggatttacttcaattacatcataattaaagctatttgggtcaagagcaagttgaacgttgcatcccccttcaattttcaaagccctaatcaaacgcagtgaacaatcacgaagcatctgatattccttatcagataaagtttgacttggtgaaaagacaattgaatcaccagtgtgaatccctaccggatcaaagttttccatgcagcagacaatcattgcattgtcatcatggtcgcgcattacttcaaattctacttctttatagcccgcaattgatttttcaatcaaacattcagttacaggggaaagttccaatccatttttggcaatctctgctaattcttcatgattattacagataccaccaccggtaccacccattgtaaaggcaggacgaacaatgatcggatagccaatctcatctccaaaagctaaggcatcttcgactgtattaactgtcttagaaggtggaactggttcacctaatgacttacataattccttaaatttttcacggtcttcggcttgttcaatagattgcagcttagtacctagaagctcgatgtgtaattcatccaaaattcctgttttggcaagttccatagccatgtttaagcccacttgaccgccaagtgttggcaaaatagcatcaggatattcttgacgaataattcgtgaaatcgattcaactgtcagaggttcaatgtacaccttatctgcaattgttgtatcagtcatgatcgtagctgggttggaattaactaaaactacttcatagccttcttcgcgcagagccaagcatgcctgtgtaccagaataatcaaattctgcagcttgaccaataataattggacctgagccaatcaccataatcttatgaatatctgttcttttaggcatgacgctcttcttcctttctctgatcaatcattgacataaagtcgtcgaataatgaaacctcatcatgaggacccggtgttgcatcagggtgaaattgcactgaaaatgcaggatatttcttatgacgtaatccttcaaccgtcccatcattgacttcaacgtgggtaatcattaagttatccttgtcaattgaatctgcagacacagcataaccatggttttgtgaagtaaaaccaatattaccagttgcaatctctcgtacagggtgattaaaaccgcggtgcccaaatttcatcttgtaagttttagccccattagctaaagcaaagacttggtgtcccatacaaattcccatcaaaggaacatgcttttctacttcacgcaccattttagttgcctctaccatttcttctggatcaccagggccgttactcaaaagaacaccatctggatgaaggtttaatacttcttgggcagtagctgtatatggtaaaacaatacaattacaatcacgttctgctagttcacgcaaaatactgtgtttaattccaaagtcgataaccacaatattgcgtttcgaaccaggaactggatatggtgacttggttgatactcggctaattacaccttgagttacattcttagtctttaattctgccgcaattttttctgcattttcttttgaatctgcaatcttaccacgtaatgtaccgtgaactctcaattttttaactaattcacgcgtgtcaattccctgaatacctggaatgttcaaatgctccaaaaactttggtaaggttgtctgcattcgccaattatcaggatgacgggcaacctggtgacaaattacgcctttgatccttggctcaagtgactcataatctgccaaggtaataccatagtttccaattaaaggattagtgaaaaccaaaatctgatcggcataagattggtcggtaattgcttcttgataaccagtcatccctgttgtaaatacaacttcaccaactgtttcgcaatcagcgccaaaaccctcgccagcatagatgctaccatcttctaggattaaataccgcattattgttcatcccttctgtatacaacctgaccatcaaccatggtcattacagtttcaccatacaccttgtcgcccgtaaatggtgtattaacgccttttgacttatagtcttcttcttttaattcagtttcatggtctaagtcaaaaatcgcaatatcagctggcttacctggttcaagtaccccggcattttttaagccaaacgttttagctggtttatcggagagccatgataaaagctgctccaaggtgaagactttttcttctttgacaaatttagtatataaagtagaaaatgctgtttcactaccagtaataccaaaggctgcgcccttcatgccaccttctttttcattgcgagcatgaggagcatggtcagtcgcaattaaatcgattgtaccgtctagtagtcccactagtaacgccgcttgatcttccttatttctcaatggcggattcatcttataataaccgttgtccttaggaatatcgtcatctgttaataaaatatggtgtggcgctacttcacaggtaacattgattccacgcgccttagccattcgaaccagttccacactagttttagttgatacatggcaaatatgataatggacgcccgttttttgtgctaaaagcaagtctctagcaatttgcgttgtttctgctaattcagttactggcggcaagtttaattccttggctttaggtccttcattcacgatccctttattaaaaagcgaatcgtcttgtgcatgagtagcaatgatcaaattattttccttggctttttgcattgccaaatacatcgtttgagcagtttggactccatgaccatcattacttaaggcaaaagcacctacctttttcaatgctgcataatcaggaatgacatcagtagtttcatcattagtgattggtccatattgaaaaatatgaaccacacctttttcattgttttcttgtaccattttttgcattagctcaggcgtattaggtacaggcgttacattaggcattgcccctaccatagtaaaaccaccatgagcagcggcttcactaccggttttaatatcttccttgtaagtttgtccgggatcacgataatgaacgtggacatcaaccagtccaggactaactagcttgccacttgcatcaatctctttatctgccgttaagttagtccctattgctttaatcttttgatcttcaattaaaacatctgctttaattagacgaccattttgataaactgtgccattcttaattactgttgccattattctaatcctccaagtcgtctaccgcgcaatactgcctcgatcattgccatacgcatgaacacaccattttgcatttgtctgacaaacatgcacttatcgctttcaactaaatcaccgctaagttcaacatcatggttaattggacccggatgcatgatgatggtgtcgggcttcaatgcactatagcgttgatgattaataccatatttttcgtgatatgctttagcattaaaagtcttttcattaggatcgcctgcatgacgttcatgttgaacccgtaagagtatcatcacgtccatatttgaaactaattgatcaatttcttcatacttaccatattgatcgaattctttatcataccagtaacttggacctgagaagtaaacttcagcgcccaacctagtcaaaagttccatgtcactttttgcaaccctagaattagtaatatcaccaacaattgcaacctttaagcctttaaagtggccaaaatgttcatgaatagtcatcatatcgagcatacattggctaggatgttgaccgctaccatctccagcgttaatcacaccaatatttaaatgttgatgttcttttaagttaatcaaatcattgtaatactcattctgtgagtgacgaatcacttctaagttgacacctaaggcgttcataattaatgaagtgtcatataaggtttcacccttattaacagacgaatgagccggatcaaaaggaataactgtcaaacctagttttctttcagctatttcaaagctcgtatgtgttctagatgaatcttcaaaaaacatattagttacataaactggcttagttaaacgtggtgttgcaccgccttttttgaagtactcagctctcctgattaaggcttctacttcattactatccaaattttcaacactcacaaaatgtggtaaattaacaagatttaaattttccattttctattctttctatacaaaaaagcctgaagcatttaattgctccaggcctagagtcttcccgtgtacacgaaaagaaatcaacccttctggccctctctggagtcaattaaatggttggatatttaactatcttctttttattttggtaaagccttcagttcaactgaatctttgccgtccttatcaattacattaacagcaacctgttcatcggcagaagttggaatatttttaccaacaaaatcagcacgaattggcaattcacggtgaccacgatcaactagcactgcgactctgattgaacttgggcgaccaacgtgcatcaaagcatccatcgccgctctgattgttcgtccagtatagataacatcatcaatcaaaacaacatgcttgtcatcaatattaacaccaacttgatcagaattgacaactggatcttgctttaaactagcatcatgacgatcatcccgatataaggtaatgtccaattcaccaactggtacatcaacgccttccaatttctgaatacggtcatgaattcgtttagccaagtaaacgcctcgcgttttaatccctaccaaaaccaaatcatcggttcctttattttgttcaatgatctcgtaagtaatacgggttaaagcacgcttcattgctagtgcatcccagatttcttttgccattatagcctcctaattctgcccatgaaaaaagctcccaatctcaactgagactaggagctttagtaaagtcgaaacttaagttaagcctgccttgctagcctcacgggactaattttaaaggacattcattgctttaaagttactgtaattagaaacgtttgtcaagctctaattaaattttacttgaccaactaattcattgatatcttcaatgcctaatttttcaagttcttgcggcaaggcatctgcaatatgcttagaagcaatactatctttaaaatgagcagtaccaaccgctacggcattagcacctgctaacataaattccaccacatcttcggccgaagcaatgccacccatgccaataattggcaaagaagtaatttgacgcacttgactaatcattctaatagctattggcttaacagcctcacctgataaaccgcccatattatggcctaacagtggtctgcgttttttcacgtcaattcgcatccctagcaatgtattgatcatcgataagccatcggcaccacccttttcggcagctttagcaattacagtgatatcagtcacatttggtgttaacttcacataaattggaatattgacaactgctttaatttttctagtcaattcttcaaccacatcggcatgcacgccaaagctcattccaccttgagccacattaggacaagaaacattaatttctaaagcattaaccaagccagaatttgacagcttttgtgctacttcaacataatctgcttcactatcaccgccaacgctagccacgatcggtaattctggatattgctttctcaatggttctaacttttcactaatcaccttttccacaccaggattagtaagaccaaccgaattcaaaaccccatcatctaaaacgtcaatctgtggttgcggattacctgtggttgcatgtggcgtagttgtcttaataaccattgctccaagatcatttaagtcaaacttcttagctgcaggcacatcgccgaagccaaaagttccacttgctggcataactggatttttcaaatctaaacctggtaattttacatgtgtattaaccataattttcctccaaaatgaatgctcacggacactctttattttttcaagaaatgattctacacgtgattataattttttccaagcaaaaattttatttgtatttttacttttgaggtgttaaacttcaccttgatcaaactttaaacggtacagagagaccgcaagttcaaaatattgacttaaattatctaggaaaagtctatccttggtgtctctctgcgctaagatagactttttttgtggaggaaaaatgaaacctgtaattgttgcattagatattgacaatgaagagcaactgcataagattttgtctaaattaggcaaaccagaaaacgtctttatcaaagtcggtatggaattattctatcacgctggcaaccaagtggttaaagacttagctgagcaaggttataagattttcttggatctaaaattgcatgatatccctaataccgtttataacggggctaaacaattagctaagttaggaattacttttactaccgttcatgctttaggcggcagtcaaatgatcaaatcagctaaagacggtttaatcgcgggtacacctgctggcaaaagcgtgcctaagttactagcagtaaccgaattaacttcgatttctgatgaagtattggcacatgaacaaaattgcgcactgtcaatgaaagagcaagttctttcgctagcaaaaatggctaagcactctggagcagatggggttatttgttcaccacttgaagtaaaagaattacacgaaaaagttggcgatgactttttatatgtcacaccgggaattcggcctgctggcaatgctaaagacgatcaatctcgcgtggccacaccagcgcaagccaaagaatggggctcaagcgctattgttgttggacggccaattactttagccagtgacccagaagctgcatatgaagcaattaaaaaggagtttaactaaaatgcataaggatcaaattatcagtcaacttattcaagaaaaaattatcactatctcacctgacaaaccattcacttacgcaagtgggatgctttctccaatttacaccgaccttaggttaacggtttcatatccagaattacgcgatatgattgctggtgatttagctaatttaatcgccaaagaattccctgaggctactattattggtggcgtcgctaccgccggtattccccatgctgcatgggttgcagataaactacacttaccaatgatctatgttcgtcctaagccaaaggaccatggcaaaggccgccaaattgaaggccgcttcagtaaagatgataagatcgttttaatcgatgatttaatcaccactggtggttccgttttaaatgcagttaaagcaactgaaaaagatggcggcaacgtcattggcgtttcttcaattttcacctactacctaccggatgcaaaagaaaactttgctaaagctaatgttaaatatgctccgcttctttcctaccctgaattactcaaaaaggaaaatgagtcaggtcatatttctagcacgcaatatgatgtcttaaagacctggcacgaagatccatgggcttggggcaaacaattcgaaaaataattaagccaaaataaagtgtctgggaaaaaactagcttccagatgaataaaaacgatcaagatttccttttttaagaatcttgatcgtttttttgttctctttaaaatttttaacaataaaaatcggcccttcagccaccttctttgacaatatttgttcaaattcatcatcataaaggcaattccgatatcggtttcgaccttctctttacctcgcaggtgcgttctgcgcatgccaaatacgttcttcaaatgtccgaaaactggctctacatcatattttctcatgccatagatgtgtctgccttcttcgctttggagaacttcttttgctttttcttttaaatattgccagttaggattatagcgaacttggcgctggcggccgctagctgttttagccaattgttccaattctggcgttagctggaactcgtctgcctcataaaccttaaaatcacggacctgaccagtagaacgatccttgcgctggctgtaatatttgaaattgaatctgacgccatgatgatcaatgtaataatcatctttttcattgtagtaccagttgattagcttagttggatcattcttatactttttggtctgttctttttcatacatagtgtagggaataaagtacttcttgtctggatatttttcctccagcatcgaataattgtattcactgccatagccagcatcggcgacgattttgtcaaacttgtccaacacggtcatttgatccaaaaccggctccaaagttttgaaatctgtcggattaggaaagatggcataatcaactacatattgatcggtcgtgactgcttgaatattgtagccaggctttaattgaccatttttcatgtggtcttccttcatatgcataaaggtggcgtcatgatctgttttggaataactgttgcgtccggcaaagatctcttcggcttcttcatatttttgcattcttggcacataatcttttcttagccggtgcagaatcttttttagtccacgtcgcttggcttttcgaggtgaaccgccaggaatggctttgttttcctgctcaatctctttagtcagcttgttaatttctgcttcagtttcttgagctaattcctttagcccctgactagtttgaactttttctttttccatttctttgactacttctttagtaatcaattcatcataaagttcaactgcctggcctttcagcttttcatgatacttttcaaccgctttgcgccagacaaatgtatagcggttagcatcagcttcaatcttagtaccatcgataaaagcagcaccttcattgattaagccttcatcttctaacaggttagtgaagtagataaagctctttttaatcagttcattggcatggctgcttgatctaaaattattgatagtatgatatgaaatcttttgctggtcagccaagatcatcattggcagattttcttccagcatcaactcaatctttctgccagaaaaaactcttctggagtaagcaaaaagcagtattttgagcatcatggctggatgataggctgggcggcccgttttagcagtcttgcctactaaaacatcttctggaattgaatctacaaaccagctgatgacattagccaaatgattggccggaatggcaaaatctagattaagtgttaaagcagtttgacctgtgatataattcttgtacatgttagtttccaccttttttattttgtgatgatttaataatatcaaggctggagctaaaagtatacaaaaagagcgttgaaacaaaaattcaacgttcttttttcatgatctgagacttagttttttcccagacactttatttttttgttttaataccaagctggcttatcaccgtcggtatttggtttatttaaaccaacattaccacgactgtctttactttggtctttaactatttcatttacataactagccacacttagacgagagacctcagttcctttaaatggggtagttgcgccttcagttatttcatagtcaacttcatctttattggtcaaccaagctggacgaataatcgtgtaatccaaatcgctagcagtaatttgatcagcagctgcacgataagtggtcaaatatgaacctaaaatattcttgttccattcaccaaatttgcctggtacctcatcatagactcctaacgaggaaatccaaatcaaacgcttaataccatcttcatccatagctttaacaactgtcttagcttgatcttcaatatttgaaccagctaaattagcataaacgatatctgcacctttaatagccggagcaagttcatccaatttacttgcatcccctacgacaatcctttcacgttgatcatcgatatcttttttatccaatttattaggatggcgtaaaaataaaattaattcattatttttatcttccaaaaataaattttctgctaatttagcaatttgtccacttgcaccaagtactgcaattttagtcatttttctttcctcatttctatcaaaatttaacttacaattacatagtaaaacttatattttgtaagtcaacgatttaccacagataacctgtatacaagtttttagttttattagttgcaaataatataaaaaataaaaaagttgtaaaattatcttagttaggagaaccaaatgaatagaaactgtcaaatcttttgtgtaaatagttctttctcgtaaattgattttttaattatttatttaatcaaagtaggattctaaggtgtcctgaacctgaccaaagcctttatgaattcgattgaaataacggtcattgtagctcattgcctggatgccaataaatgcatcaagcgactgttcagttggaaattctgccttaggcttagctttacgcttgatgacgttgttaaaggattcaatcatattggttgaataaattgaagctctgatttgtttgggataattgtagaagactagcagatcgggctcaatttccttcaaacctttgatgacatggctataagctttattccatttggcatagaatttgtgcaagacagctgcagcttcttttttgcttgtctgttgatgtatctgcttgaattcgttcatgatcttttcacgatcgtcgacgcgtactttagcgcagatattgcgcatgacatgaaccaggcagcgttgaaaatgagctttaggataagtcctggccaaggctgttttcatgccaacaacaccatcagaaagaaaaagctcaacttgcttcaagcctctggacttcatgttttgaagcatctctgtccaaacttcaatgttctcactaggagcaatgcagtagtcaatgacttccttatgtccattaggtttaatgccaatggcaatatatactgcttcacgctcaaacgtttctcggcgcaaaggaaggtatgtcgcatccaaatagacacagaaaaacttgtcgcttagcttgcgcttgtgataagcctcaatcttggggagcatctgcttggaaatatttgatacttgagctggactataatgactgccatacattttctcaatcaagtcagcgatttctctggtagttacgcctttggagtatagcttgataatcgtgctttccaaaacatcagagtgctgcttgtagtcaggcagcgtgtgctgatgaaattgaccgttgcgatcccgaggcacttgcacttcaattgggccaaattgcgtatcaactttgcggaaataagcaccatttctagagttgccagtattccagccatttctggcatagggatcatagcccagaaaggcagtcaattcagcttctaacaagttattaacagcctgttgtagctctttgcgcaataaatcatttattttgtctggattgaatagagcttgagcaaaatctttggtaaaatcattcatgaaggagttcttctttctgtatgtgtttttttgttcaaaccaatcatacgagaaaggaactcctttttctaatgtttaaagaaataaatttaaggaatcattcatccttacacaaactattttacagtctccaaataaacactggtcattttaagccaggtcatcttttatcagaaaatcaaacgcgtattaaacttaacatgtctcgtactccaattagagaagcaatcaaacaattggaaaatgaaggcttactagttcgtcaaggacaaaaaaaatcgttagccatattacattagctgaattaaaagacaattatgatttacgttctctattagagagttatgccttggaaaaaaattttcccaatttagatccacaactggctaatgattatggaataaaattccaagaaattttagcaaaacatgattggcaagcttatcttaaacttgatgaactattccatgtatttttaactgaaaataccggaaatcccacgcttcagcgaaccatcgatcttttacgtactcaaaccaatcgtatgcgttatgccatcgtagacaatgatcgttgtatgaaatcctcggttcaggaaataatggatattatttctgcagttgagaaaaaagatattttgttagcctctaacgctttaaagaagcatataaaaaatgtctatgattgggaacaacaatttttacaaaaataagatcattcatcaaaaacataaatgccttttttgctatattttgttaggataaaaaggatgtatcgtctgtaatatggggaaatgtaatgattaaaaatgcaaaacagattttagcaaaaccttttttcaaccaacatgactaaaactttggttcaagcaatttcagttgggctaactactggagttatagttagcgcatttcgctggattattgatcaaactatgaagttgctttatcaaatttatccgcaaatggcagcccagcgagtactgatcgtaccctacatcttattgatgttcattattgcaataacattaggtaaaataactgcgccttaccttgaacaagtaattggctcaggggtaccacaaatcgaggctgttcttttaaatgaaaataagatgccatggtggtccattctttggcggaaatttattggaggcttattagctatctgtcctggattaatgctaggtcgtgaaggtccttgtattgaaatgggcgcaatggttggtcaaggattagcagaaaaagtatttaaatctaacaaggaaaatttgagaacgctacaataatgcggtgtggctgcaggattggctgccgcctttagcgcgccaatagctggtgcacttttcttggtcgaagaaattacttttgattttaaacctcaaaaagtagtagccgtcttggccgccactttttcagctgacttcgttactattctagcctttggaaacaaaccattcctttatttacccgttaacgattatttacctttaattggtatctttttgggaataatggcatacatttatcaatatgtactactttcgctaaagccatggttcagtaaaattaaaaaaatccctgcagcctatcacagtatcattcctttaattttaatcccggatttaaaattgaagtgcaacactaagtgttaaacaaaaaggccatgaagacctaaacttgaagtgacgaaaaatcaagaaaggaagatcttcatgaccaattcaaattctagcatttctaagcactatcatcaattaaccagcgtacaacgtggacaaattcaagcaatgctggattccggcataacttcccgtactgttatcgctcaagaagtcggctgccataagtcgacaatcagtcgcgaaatcaaacgcggaagtgtcctgcaaagagacagcagctatttattgtatgagcactattacgctgatactgcacagatttattatgagaagcgtcgcaaaaactgctatcagcgcaatccattgaagcattatgctgtctttttgagaatgctctccagacgctttaaagctaaatttgatgccaccagcatcgatgaattcgttggtgaattcaaatgccaggctacccttgtcccagcacaccaactgtctatcgctatattgatcagggcttgctggacataagcaatattgatctgcctatgaagctcaaaagacgcaggaacaagcgtcatcacagccatggcggtcacgctttgcacaagaagcatcttggcaattccattgaacagcgtcctaaagagattgaagacagaaaagctccgctgcactgggaaggagatctggttaaaggcgtcagacgcaagaatcagcctgctttaatgactttgactgaaagaaccacacgctttgaagtagttatcaagattcctgactatcgggcaagcacatgccaaaggctgcttcaaaaggagattgacagacatcctgcctggtttaaatcaatcacgtttgacaatggctctgagtttgcggatatgaccaagatcaagggctgccagatttactttgctcacccatattctccatgggaaaggggcaccaatgaaaactgcaatggtcttttgcgtcaattcttccctaagggcaagagcatgaaagacaagtcaaaagcttatgttcaacaggcaactgatgccattaaccacaaatatcgccgaatcctccaatatcacacagcagaagaactcttcaagcaatatatttcctcatagcctaactgttgcacttaatttgacaattcaggctttaattttaattattccagttggtctatttaatgcccacttactcggtggttcacatgtgttaattgataatttattcaatttgaattggaatgtcaaagcctttggatcatgggactttttttactaccgatcttattcttgataattcggtttgtcttttcaatgctttcatatgattcttccgtacctggtggtattttcatgcctatcctagttcttggggcattattgggaataatttgcgccaatattatgataaaattgcagattattttgccaatgtacttccctcatatcctagtgatttccatggccgcatattttggtgcaatagaaaaagcaccattcacagcaattatgctactgactgaaatgattgggactgtccagcaagtattgccaatgattattgttactttcgttgcttactacattctggacattttaggtggaaaaccaatttacgaggacttacgcttgcaaatgaattatcataaaaatatgtcaataatttaggaaaatgtcccaaaattatttaattattagcggagaatttgctctccgctatttttatacgtattgatggtatttatgagctctcttttgttgctttatgaatgattctcgcttccatggatgtgacattggtggaatccactttttcttggtccttttctttttaggctcttggtctacttctggcgatattttggcattcttaggaatttctttaagcagatatacatgctcatctactgtcgttagcagttgtccatctagggcttcaattaccagacatttagttcctttcatgaagcagactaatttgccatattcatctgttgcttgataaagcttgtttttgaaagaaatagctgagccgctatcaaacactctgccagtgagaacggccaaggtataattgattttgcagtcatcaggagccttttcaaaaacataccaggctttacgactagtctgactgaagttttggttaaagtcaggaacaaacacatcatgcaggtatttatttgcctcgttgattgtcatgattccagccaatcttagttctggcttaaggcgaccttggacggtttggttagctctttcaaccatgcctttggcttgagaaacactagtagtttttagatctacgccaagagttttgcaggcatagccaaattgtgtcagcacatctttatgggcagctttggtttgagcagtctcataattgaatacagtccgattatcagtcttaaagcaaaggggaatgccatattccttaagaatttgctcaaagacgtgatagtagccattcaaagtctcttcccagtcaaaataagccccaacaataatgccagtagcgttgtcgattgcaaggtgcaggtaagccttacgcttaccaaaccagactaagacagaagcatccatctgaatttcttcgccgaagtacttgcatctttcatggcgaggatgagcatctgccaaagctagttgatgatcaactgcagcgctgacttcttgtttgctttgcttagggtgctgcttatgccatttctttttggctaaggcacgcttagtctttctccaaggcttaggggaaagaatatcctgctgcttgagcaggctgtaagctttggtataagagacatgaatgtcctcaaagcgatctaacagctgtacaaaatgttttatattgcagtcttgatatttagtacggtataaggttacaatttgattgttaatttctgtggtgagacaattaacaggtttgcggtctttgttcccatgaacgaaggccgcttttcctttagcttgatactgcttgattctcctgtttatttgtctaacggatattcctagcttcaaggctgctcttttcttattgccgttgtgatctacaagatccttaatgactttgtactgttcatcatatttcatagttaaatcaatcctattcactctaactataacctccaataaaggaaattatgtcatacttactacaattaggacattttcctaagttaacagttaagacattagagactgtcaagaagtttgtgtaaataatctctctcgttgattgacttttttatttatcttttaatcaaaataggattctagggtgtctcgaacttgcccaaatcctttatgaatcctgttaaagtaacggtcattgtaatccattgcctgaactccaataaaggtgtcaagcgactgctcagttggaaattctgttttaggcttggttttccgcttaagcctgttgttaaaggattcaatcatgttagttgagtaaattgaagctctaatagctggcggatagttgtaaaaggttaacagatcaggctcaacctgtctaagatctctaactacgtttttgtaggctttttcccagttttgatagaattcatgcagcacctgtacagccatttctttgtttgactgagtatgaatctgcttgaattcatccagtgcttttttcgatcgtcaacccgcattttggcactgatattacgcatgacgtgtaccaagcagcgttgaaaatgcgctttaggataggactggcagatagcctctttcatgccaactactccgtcagacaagaagagctctacctgttcaaggccgcgcctcttgaagcctttgagcatttcgctccaaatctcaatattttcagtaggcgcaatacagtagtcaatcacttctttatgaccattaggtttgataccgatggcgatataaactgcttcgcgctcataagtgacccgcttaagaggaatataggtggcatcgagataaacgcagaagaacttatctgacagatgtcgctgatgatatgcctcaactttgggaatcatttctttagaaatattggaaaccatagctggagaataatagccgccatacattttctcaatcaaatcagcgatttctcgggttgtgacgcccttggaatagagcttgataacagtttgctctaaaacatcagtatgccttttataatctggcatagtgtgttgatgaaactcaccgtttctgtctctaggaactttgatttctatttgtccgaattgcgtatcaaccttgcggtaataagcaccatttctagaatttccggtattccagccatcgcgctcataaggattgtagcctaaaaaggcagtcaattcggattcaagcaggtcattgacagcctgttggagcttttgtctaaataaatcattaattttatcctgattgaatagagcattagccatatctttggtaaaatcattcatgaaggaatctcttttctagtatgtttttcgttcaaatcaatcatacgggaaaaggattcctttttctaatattcaggaaaataaaattaaggaaatattcatccttacacaaaatattttacggtctctatcttaaagtcattgcttcactggagtgatttagcattttcataactaaagcagtattatgattagtctgctgataaaccataaaagctcctgtttttctcattgagtgtgagccaatccaattaaccccaattttaagctcggtctgatgacaaattctataaaaactattttctcttattggaacatcctcacctaatctcctagaacttggaaatagccattcagaagaaaacagcttcgtgtagggatgcttcttttcatattcttgcagccaatcatagtaatcctctaaaacatccctaactggagttaaatataatcggttaggcttttttgtctttttgtcaacgatataagcatttttcttaactctgccattggcttgaaagacatcattctttttcaaagctagaacatcacttacccgtagtaaggttgctttaccggtttgaaatatagcatagtttctttctcccatactagtatcttcacgtaaatgtttcaaaaacttctttaaaattattggatcagtaattggacgagtatctttatgcttcaatttacgtctccttctgtcaatttttatattagtccttgatatacaagtatttcgtcactctatgttgaataattagtctatagctaattatactacataatcaacacaccccaaaattggcatagcagaataatgcatgattagatgtactatgtagaataaaatctcattattctacatagttagaaagtacaaaaaagaatgctaatttcccataaaaataagaattagcattctattgcattaaatgattaaattattaacctctgcagtcgaacttgacctcagaatcgtcctctcagcataatcgaactagccttaaaattggcataattgttttacctattctagtcccaccatatcattcacgaaaccttgaagtttgtctaatagctgaatatttacgtgattaacaatttctccatttctagattcaaagtcaaaattctgaagttgccataaaacaacataaccttttactccagtgccattactgcctggaattaatattggctcgtaatgtgggttgccttgatatttatctgaagtagtaatcggcatccctataaacatatgtgttgatttattataggcactggtactcattaccacataatgtcttctaatattacctttatgcggattatggccacccatttcatgtccggaatgaggttctgcatctgctttaacaatatctccctttttcggataaatcattaatcaactacctcacgtcccactggttttactgattgtagttccacgtcattttctatgtctttttgataatcataattttgccattctttggttgcaaaaatatttttctttttcttcacgacgggtgtaaaaactatattcatcccctcatttttcacagtatactctttactagtaattattatatctttaggaactgttaaagtttttgaatttccaacttttcttaattttacagtcatagttgtacgcctctttcttttttgtgtatatttagtatacacaaaattacaaagaaagtaaattatgttttagcgttacatcaatagatggggagatattctttgttctttctcctagctatttgtccttattgcataaaaaatctaaatattttaaataaatttagcatttttcttttttgcgaatgtaactgctgagaaaactgtatataatagctcttgacccctttagaaaaggaatttagttttctatgaaaggaattaataatggacccggatttaaaattgaagtgcaacaccaagtgttaaacaaaaaggccatgaagacctaaacttgaagtgacgaaaaatcaagaaaggaagatcttcatgaccaattcaaattctagcatttctaagcactatcatcaattaaccagcgtacaacgtggacaaattcaagcaatgctggattccggcataacttcccgtactgttatcgctcaagaagtcggctgccataagtcgacaatcagtcgcgaaatcaaacgcggaagcgtcctgcaaagagacagcagctatttattgtatgagcactattacgctgatactgcacagcttcattatgagaagcgtcgcaaaaactgctatcagcgcaatccattgaagcattatgctgtctttttgagaatgctctccagacgctttaaagctaaatttgatgccaccagcatcgatgaattcgttggtgaattcaaaaggactatgccaggctacccttgtcccagcacaccaaccgtctatcgctatattgatcagggcttgctggacataagcaatattgatctgcctatgaagctcaaaagacgcaggaacaagcgtcatcacggccatagcggtcatgctttgcacaagaagaatcttggcaattccattgaacagcgtcctaaagagattgaagacagaaaaacgccgctgcactgggaaggagatctggttaaaggcgtcagacgcaagaatcagcctgctttaatgactttgaccgaaagaaccacacgctttgaagtagttatcaagattcctgactatcgggcaagcacatgcccaaggctgcttcaaaatgagattgacagacatcctgcctggtttaaatcgatcacgtttgacaatggctctgagtttgcggatatgaccaagatcaaaggctgccagatctacttcgcccacccatattctccatgggaaagaggcaccaatgagaactgcaatggacttctgcgtcaattcttccctaaaggcaaaagcatgaaagataagtcagctgcttatgttcaacaggcaactgatgccattaaccgcaaacatcgtcgaatccttcaatatcacacagcagaagaactcttcaagcaatatatttcctcatagcctaactgttgcacttaatttgacaattcaggttttagaatatgctatacttactgatagaaagtgtgtaggatttacatataaaggtgtaaaacatggcagtaactattaaagaaatagctaaaaaagccggcgtttctattgccaccgtttcgcgatatcttaatcagaatggttacgttggcattgattcggctttaaaaataaaggaagctatcaaaaaactgggttataaacccaagaatgcaatttccgctaaaacagaattaaacttaattgaaatcaatttttcgcaaatcaataatcctttctattcagaactgtatgaatacttggctactattttgcaggataaaggttatgattgcattttgcatttagatcattatcaagagcaagatatgcagtattatttggataaatataagcaaaaaaagatcgtaggcttacttaccagctcgccaattcagatttcaaagaagagtggcaagcttaatctaccggtggttagttttgaccgggtaattagtccgcagatccctactgtgcagtcgaataactatgatgcggagatgcaaattgcaaagtcggttttaaagcaaaaaaagaagaaagtaatcattattgctggttccaaagaagactattatccaatcagtgatcgtatcaaagggatgatgtgtgtgtttaatacctttgacgttaaatttgatttacgctcaattagcgcccgtgaatcaattatcgcatcgtaatcgctatccttcaatttttgaaagataacgattacgatgcgatttgttgtacggatgacattacggctttattggctaaagaatgcaacgattatttaaataaaaaatcgttaattacaggatttgacggcacacaattgattcagaacctattcccacatttaattagtgcgcggcaacggactaaagagattgcgaaattaatgatccagcggtatcattggagagtgtttatactttgcccgttagcttgattaatcaggattaaaaaaacaggattgcccattttggaaacaatcttgttttttaatatttttaattaactatctaaatctaaccaattcttttaacatttctagccttaataaagctaccatcttttaattgatagaatttcttccctttaatcttaacgaccttatcagaatgaagtgaaatatgcttattcttcttaagtaaaatgcgctttccattcttcttaactgctttaccatgcttattataaacgaatgagttatgagctaacttatagtaactaacagtattagcaactttgacaaattgatttttagctactttatagaacaacttacctttaatactatactttttaccattatccaaaggcttaattgtatctccagctttcaagacaagcttgttatcattttgataaataggatttgcttcactgtcatacacataagcattatgggtcaataatatttcagtggttgtattatcctgagtagaaactgtagtagtctcttctgatccattaattatatttttagtattgtctataatactattttcacttggagcttcaggtgtaataattgtttcttgcggaacaattggattggctggcttttgatccggaatccttggattttctggtgtagttggtttacctggcttatcacctggagtggttggacttacaggctgatctggttttggcacgtctggtaaaaccattgttccatcttcatcaactacaagtgtacttaatggtgccagcatagttttatcacttaatttcacattgccatcactatctaacaatttcttaccatgtgataaatcaacattatttagagcaactttatcattgttgacattaaagacaattaataacttcttgccattaacattatattcgtactcaaatacacccttgatgtttttatctttggtttctctaccataactaataattttagtaacattctcgtcataaatcttattgaaatcattcaaatgcaaaattggcagctgtttacgtaatttagccaatttttggaaatattggactgatgctttattagcaccaactctttcccaattaatttcattaatatttactggtgaattatatgaatttgaattgccacctttagttcttaatgcttcttgacctgagtggaagaaagaaataccctgtgaaagcatgatcattgagttagccaatcttactctcctggcaatattctcatctgattcatttggcattgcagccttgatgtaatcatacaacgtcttaccatcatgacaagcggcataattaaccatttggcttggagttgcatagttatgtggctcccaagaatcattatgtaaccatttacctcttaaaaaactatcggtaaacaagacagcatgcttatcaaagtttttttcattaccgttaccaattactaatcctggttcggagccatcattattacctttaaccgagtttctcatatcatcactaaagaaaccaacattaggaactttatccgcagtgtattgggtcgttccttcttctctagtatatttctggttaccaacttcccagccttcaccataagtaataataccaggatcaatcttatctagagcagctctaacatcattcatagtctctcgatctagtaaggacatgatatcaaaacggaagccatctagattgtagttcttagcccagtaaactactgagtcaacaatgtacttgcgaaccattttacgttgactaccaatgtcattaccgcagccactatcacttgtggtattattatcagcatcgtaacggaaataatatcctggcactgttaattcaaaagcttgctcttgaggattataaacatggttgtataccacgtccataatgaccctaataccagctttatgcaggccattaatcatttctttcatttcgataattctagcagttggattagttggatcagaagaatatgatccttcaggcacatcataattctttggatcgtaaccccagttgtattgattctttaaactcttagtttcatcaatgctagcgaaatcatatgaaggcataatttgaacatgagtgatgcctaatgccttgagatagtctaaaccagtaacttgtccagttggtgtcttacctgattcaatcatccctaagaacttacctttatctttaattcctgagttaggatcactactaaagtcacgaattgaaatttcataaacgattgcatcagttggcttagagaatgaaggcattcggttaaaatctgtcggtttgatattattgtagtcttcaattacacttctaacgccattgacagtaacggctttagaatatggatcatcagtctgtgttattttgccattaccaaaagttaacttaaaatcataagcccagccttttttatcgcccttaataataccagtccaaacacctctatcgcctcttgtcaaagcaataacattcgtaggcttggcactattatcaacactatcatataaattcaattcaacatctttagcagttggagcccagagtttaatttgcgtctttttactatcataggtgcagcctagatcgtcaccatcataggcatatttatcgtcaaaagctttggaacgaacataaggaccgatatcaacatttttaaagttcatccctagtccaacttggttatcctttaaaatatcaatatctgttttggtatgaataataaatttctttgctttaccatcagcattagcatcgactgcttcaatatgatcaatactattatttcgcagactaagttttcctttaattttatcgacagtagtagccttacctgcttcaacagtcaaactatctggtgaagtcatatatgcagaagatagactttgatcagctaaggcaaaactcttgctataataagcttctgtatcatttttaactaaataaatatctgtcgccttattacccggtaacggagtgaattctcttgttatttcatcagaaccaactggcgcaacaaaaagtttactaaaatcagtattgtctaatttgattgagccatcttgactattgccttgtttggttaagctaataagttgtttattatcttgatccttatctgtccaaacattaaccttattaacttggtcatcaccgtaataatgcaaatttatatttgcggaatggtactctggtgttaccttttgggcatcatcactacctgctttatagaagacttccgctttgccattatcgctaacatttaagctacgatcagcacctgtaccgtctttaccagcccaactgcctttggttttaattaaaactcctacttggtcatagtttttatctaaatcaataaccgagtaatacccattatcatctttgccggcccatttgtattcattgccgttaccattaggtttcttaccccaaatataaggaacccatttttcaccatcaccattgtagtgaataactactttagtctgatctttaacttcctcacgtgctggagagttatttgttccctcatctttagttttggctgccaaaactgtaggaacgttttgaggagctacaccttgttgacgctgctttgcttttgcgttactttgattttgtacagtagcagtagctgcattatctttgctagaattcgtttggcctacaacttctgaacttttaggagctgcattgtcttctgcagcatgaacttgagtcgtagttaagtttgcccctaaccaaagactcataatagctgaagtacatacaaaaattgatttaaatttgatattatgaccactctttttattcataaataaattcctccacaaaatcatgttttttcaaattcaacaataaacgtatgcgctttcatttgcaatataaaaatgatttctgttatcgataacattatattcacaaaattcatttttaatagttaaacaacttttatctatgtttaaatcaattattaatatgtttgaattgagtagtgaagaaatttaatctgaaactgtcaaattttttgtgtaaatagatttttctcgtagattgattttttaattatttatttaatcaaagtaggattctaaggtgtcctgaacctgaccaaagcctttatgaattcgattgaaataacggtcattgtagctcattgcctgaataccaataaaagcatcaagcgactgttcagttggaaactctgccttaggcttagctttgcgcttgatcacattgttaaatgattcaatcatgttagtcgaataaattgaagctctgatctgcttgggatagttataaaagaccagcagatctggttctatgtctttcaagcttctgataacatggctgtaaaccttgccccatttggtatagaagtcatgcaggacagctgtggcttcttctttgtttgtctgttgatgcacctgtttgaattcgttcatgatcttttcacgatcgtcgacgcgtactttagcgcagatattgcgcatgacatgaaccaaacagcgttgaaaatgagctttaggataagtcctggccaaggctgttttcatgccaacaacaccatcagaaagaaagagttcaacttgcttcaagcctctggacttcatgttttgaagcatctctgtccagacttcaatgttctcactaggagcaatgcagtagtcaatgacttccttatgtccattaggtttaatgccaatggcaatatagactgcttcacgctcaacgctcaaacgtttctcggcgcaaaggaaggtatgtcgcatccaaatagacgcagaaaaacttgtcgcttagcttgcgtttgtggtaagcctcaacctttggaatcatctgcttggaaatatttgatacctgagctggactgtaatggctgccatacatcttttcaattagatcggctatttccctggtggtcacgcccttggagtaaagcttgataatcatgctttccaagatatccgagtgctgcttgtagtcaggcagcgtgtgctgatgaaattgaccgttgcgatcccgaggcacttgcacttcaattgggccaaattgcgtatcaactttgcggaaataagcaccatttctagagttgccagtattccagccatttctggcatagggatcatagcccagaaaggcagtcaattcagcttctagcaagttattaacagcctgttgtagttctttgcgcaataaatcatttattttgtctggattgaatagagcttgagcaaaatctttggtaaaatcattcatgaaggagttcttctttctgtatgtgtttttttgttcaaaccaatcatacgagaaaggaactcctttttctaatgtttaaagaaataaatttaaggaatcatccatccttacacaaactattttacagtctccttattaatcacagcttgcaaatgaattatcataaaaatattgacaaataattatatttgatggtaaagtattgccagattaatcaattcaagtaataggaggaatcacgccgatgcgtttttaatttctgattttcgttaagtaaaaaataatgcattctactagtttaaggatgtactttttgcttgtgatcagaaattagtctgcgtgattttctttaatttaaattaagaataattatagattagccaacttggactaatctatcaggcaccattttctcagatcataagcacagtttgagaggacggtgcttttttatgtctacaatttcactaaaaaacgtttcatttgcctatgacggtcaggataaaatttttgataatttaaacctaaatctcgattctaattggaaacttggcttaatcggtcgtaatggtcgcggcaaaaccacttttatgaaaatgctgctaaaacaggtcgaatatcaaggaactattcaaagtgatttagaattcaattactatcctcaggtaattaatgatcccgataaccttactatttatgctttacaagaacagtttaattttgaggaatgggagttaaaacgagaattaaatctgcttcatgctaaagaagatatcatttggcagcccttttcaacacttagtggcggtgaacaaacaaaaattttactggcgctttgttttattaatcaacattcttttgccctactagatgaaccaacgaatcacctcgatgaagatacacgaaatcaagtagcacaatatctgcataataaaaaacaaggattaattgtaatcagccatgaccgaaattttgtagataaagttgtcgatcacaccctagcaattgaaatgcaaaaaattaggctggaacaaggaaactatactcgttatgaaaaacaaaaggaattagaggatgaatctaatatcgcttataatgcaaagttagaaaagcaaattaaaaatctccatgccagtcaacaaaagatgcaaacttttgcccagcgttccgaaagcaacaaaaatgcgggagccaagatgaaaggcgatattcgacatagaagtacagtttatgataaaggattcatgggacacaaagccgccaaaaaaatgaaacttgccaaaaatgtagaagcaagattagataaaaatatcgaagaaagaaaaggtcttttaaaaaatattgaagcagacaatgacctagctatgaattttgtccccgaccatcataaacatctaattactgctaaaggagttagccttgcttatgacaagcttccccttttccaacctactacctttgatttaatgcgtggtcaccaatttgtgattactggtaaaaacggtataggaaaatctagtttgtttaaggcaattactaatacttttgctggaacaattactggcaaattgcattcagctgataagatttcaatctcctatttatcacagattgaacaatctaataacctatcattaaaagattttgcccaaaagcaccaccttaactatgccgattttctcaatatcttacacaaattaggtactgaacgtgatatattcactaattcaattaatcaaatgtcttcaggccaacaaaaaaagatctacttagccaagtccttacttgaaccagcaaatttgtatctttgggatgagcctttgaactatttagatgtctttaaccaagaacaaattattcaattaattaaaaaatatcatcctactattctagtaattgaacatgatcagcgctttattgatgaattaggtgctcaagtcattcacctaacatagtaaataaaagagcgagttagttttaaagttaatactaactcgctttttgttgctaaaataacttcatcatgtactcgctaaccgccttttgttgcatttcttcccagctagcaaacttggtctcttttttaacaaattcatcgacttgatctatcgccatctgctcaatttgcgtaaagtctttcacgcccaattctctgacaaaaaagtcaatagtagcaaaactagtatacttttgcatcaattgtggtgtaaacaagtcttgataagaaactgcctgctggctgcccttttgctcagctagatgctccaaattttgttttaattctgctttttctttagtcatttaaccaacctctttcacttttcatattattatgacaaaacttcggttaaaattgcaaaaaacgaaactgtcaaatcttttgtgtaaatagatctttctcgtaaattgattttttaattatttatttaatcaaagtaggattctaaggtgtcctgaacctgaccaaagcctttatgaattcgattgaaataacggtcattgtagctcattgcctgaatgccaataaaagcatcaagcgactgttcagttggaaactctgccttaggcttagctttgcgcttgatcacattgttaaatgattcaatcatgttagtcgaataaattgaagctctgatctgcttgggatagttataaaagaccagcagatctggttctatgtctttcaagcttctgataacatggctgtaaaccttgccccatttggtatagaagtcatgcaggacagctgtggcttcttctttgtttgtctgttgatgcacctgtttgaattcgttcatgatcttttcacgatcgtcgacgcgtactttagcgcagatattgcgcatgacatgaaccaaacagcgttgaaaatgagctttaggataagtcctggccaaggctgttttcatgccaacaacaccatcagaaagaaaaagctcaacttgctttaagcctcgggatttcatgttttgaagcatatctgtccagacttcaatgttctcgctaggtgcaatgcagtagtcaatgacctccttgtgcccattaggcttgatgccaatggcaatatagactgcttcacgctcaaatgtttctcggcgcaaaggaaggtatgtcgcatccaaatagacgcagaaaaacttgtcgcttagcttgcgtttgtggtaagcctcaacctttggaatcatctgcttggaaatatttgatacctgagctggactgtaatggctgccatacatcttttcaattagatcggctatttccctggtggtcacgcccttggagtaaagcttgataatcatgctttccaagatatccgagtgctgcttgtagtcaggcagcgtgtgctgatgaaattgaccgttgcgatcccgaggcacttgcacttcaattgggccaaattgcgtatcaactttgcggaaataagcaccatttctagagttgccagtattccagccatttctggcatagggatcatagcccagaaaggcagtcaattcagcttctaacaagttattaacagcctgttgtagctctttgcgcaataaatcatttattttgtctggattgaatagagcttgagcaaaatctttggtaaaatcattcatgaaggagttcttctttctgtatgtgtttttttgttcaaaccaatcatacgagaaaggaactcctttttctaatgtttaaagaaataaatttaaggaatcattcatccttacacaaactattttacagtctccaaaaaactttcttaatcttctttattattcgttataattaaaaacagaataacttacaaagcagggattaaaatgactaatcggtataaaagtgtttttgacattattggccccgtaatggtgggaccatcaagttcacatacggccggagccgtcgctattggacgcgctggttacaaactttttggcggtaccccgagtaaagttaccgttcattattacgactctttcgcccaaactcaccgtggtcatggaacagactatgctattgcggcaggtattttaggctttgactcagacgatctacgcgtaccaaaggcacctgagattgcacgccagcgcggcgtagatttacgttttgttgaagaagatggtcctagcccaattggtcaccctaatactgctattttaaatatgtctaatgataaaaagaaagtggaattggctggatgctctatcggtggtggtgcaattgaaattcgcaaaattgtcttacataataccgagattcaacctgctggtgcattacctattattattttagttgatccacacaaaaatattcgcattgaacaagagcttaccgcgctcttacacgaaaaagcaccctttagtcgcaaacgaatttttcatactaaaaactataatatttatgaatatgatgtagaaaattatcttcatcctgatttattgagactgtaaaatagtttgtgtaaggatgaatgattccttaaatttatttctttaaacattagaaaaaggagttcctttctcgtatgattggtttgaacaaaaaaacacatacagaaagaagaactccttcatgaatgattttaccaaagattttgctcaagctctattcaatccagacaaaataaatgatttattgcgcaaagagctacaacaggctgttaataacttgttagaagctgaattgactgcctttctgggctatgatccctatgccagaaatggctggaatactggcaactctagaaatggtgcttatttccgcaaagttgatacgcaatttggcccaattgaagtgcaagtgcctcgggatcgcaacggtcaatttcatcagcacacgctgcctgactacaagcagcactcggatatcttggaaagcatgattatcaagctttactccaagggcgtgaccaccagggaaatagccgatctaattgaaaagatgtatggcagccattacagtccagctcaggtatcaaatatttccaagcagatgattccaaaggttgaggcttaccacaaacgcaagctaagcgacaagtttttctgcgtctatttggatgcgacataccttcctttgcgccgagaaacatttgagcgcgaagcagtctatattgccattggcatcaagcctaatgggcacaaggaggtcattgactactgcattgcgcctagcgagaacattgaagtctggacagatatgcttcaaaacatgaaatcccgaggcttaaagcaagttgagctttttctttctgatggtgttgttggcatgaaaacagccttggccaggacttatcctaaagctcattttcaacgctgtttggttcatgtcatgcgcaatatctgcgctaaagtacgcgtcgacgatcgtgaaaagatcatgaacgaattcaaacaggtgcatcaacagacaaacaaagaagaagccacagctgtcctgcatgacttctataccaaatggggcaaggtttacagccatgttatcagaagcttgaaagacatagaaccagatctgctggtcttttataactatcccaagcagatcagagcttcaatttattcgactaacatgattgaatcatttaacaatgtgatcaagcgcaaagctaagcctaaggcagagtttccaactgaacagtcgcttgatgcttttattggtattcaggcaatgagctacaatgaccgttatttcaatcgaattcataaaggctttggtcaggttcaggacaccttagaatcctactttgattaaataaataattaaaaaatcaatttacgagaaagaactatttacacaaaagatttgacagtttcaatttattgcaagaactaaataaaaaatttgagaatattatttgtttataacatagggcaatattatgtataaccatattaaggaaattgttgctgcagcagaaaaaacgcacaaacctatttctgaattaattattgaacaagaatgtcaactatcaggcttgccacgagaaaaagtctggcagcgcatgaaatataacttgcaaactatgcgagctgccgttaaaagaggtgaatctggaaacggtgtcttttcaaaaactggcttaactggtggcgaagcaattaagctgaaaaaatatcgcgagaaaggacacacactttcaggcgatacaatgatggcagcagttgaaaatgccatagccactaacgaagtcaatgcagcgatgggcgttgtctgcgctaccccgacggctggttcttccggcactttacctggcgttctatttttattagaaaaaagattacagctcagcgaagagcaaatgattcgctttctttttactgctggcggttttggcatggtgattgccaataatgccgaaattgcgggggcaactggcggctgtcaagcagaagtcggtagtgcctcagccatgggtgctgccgcggcagttgaagtagctggtggcagtgctgaacaaagtgcccaagctttatcgattgcgatgtctaacttgcttgggttagtctgtgatccgattgccggtttggttgaagttccctgcgtcaaaagaaatggtattggcgctggtaatgcacttatcgcagctgatatggcgctagcgggatgtacaagtgtaatcccagctgatgaatgtattgaagcaatgaagaaagttggtcatcaaatgccggcatctctgcgtgaaactggaatcggcggtttagctggtacaccaacaggtcaagcaattaaagcaaaaatttttggtaaagatgcgtaggtaacacaatgcgtgatagcaaaacaattaaaaacgatattattgaacatttagctcaagttattgacccagaattaaacgtcgatgtggtcaacttggggctgatttatgaaattgacctcgatcaagatgggatctgtctcatcaatatgacattaactacacctgcctgtcctttgactgattatttgatcaagcagattacaacagccgttaaaaaagtccctgaagttaaaaatgttgatgtagaatttgtctggtatcctgtttggacccctgaacggatgagtgatgcggctaaagaatacttcaaaatacaataaaaaagtctaggctaaaattttgcctaggctctttattactttccaaattatttattcaaataggccacaaacaattcagtatagatcttcacaaagttcaaatacatcttttcatcaacatattcgttaacttggtgcggcgtgtcattaccgggaccaaacatggcaaacggatagctaggtcctttgtcggcaatcaaattcgaagcatcagttactggtttaatagcaactgttggaatcggcttttccgcatattttgctccaattttttgggctaattttacaaattcagacttaccgtcagttttaattgaaggttccgacatatagatgtacattttgattttagctccttgcgcattttctgccttaactaattcagttaatttcttttcaaccaaactattattgaactcaggaatagtccgcacattaatttgcgcggtagcctctccgggaatcatgttgacctgttccccgccagtaaaaacagtagtattgaacgtcaacttacctaagtctggattgtttttatctgtttctctaaaagccttgttggccttaactaataaatccattaatggatcgatcgcattataacccttttcaggcattgagctatgagcttccttgccttgggaagttaacttagtatccatcgaacccttatgagcaatggcaatactgtagccagaaggttcaccaaccaaaagtagctagcagcctgatactaccatgcttaattaaatggtgttcatgaatattaatcatggcaataaccaaggcagctaaaccagacttcatatcagtcgctccgcggccgtacaatttaccatccttattggttaatttaaagggatcagtatgccattgatctaattcacctggtgaaacaacatccatgtgaccacaaattgctaaaatgggatggcctgttccgatttcagcaaataaatctgcgcgagttgtggaatattccaacaaacgtgaactaattccatgttctcctaatagtttttgtaaatattttgctactaaaatttcattatcattaacggattttattgcaacaagatcactcaagattttaagctcttcagtatcagtcaaaacattattctcttcaataatttaattttcctctccaaaaatcgaatcgctttcaccttgattgtagccgctgagttcttgatagtaaaaaaatatgactatcatttattcaatgacaatcatattgaaaatattaattatatttttgctttatcttactgaagcaccagttgtggtatcagtctctggttccggagctggctttccttctaacttagaagcaccagataccgcatcagtttgcttaacttgattttcgtcagttaccggatattccttgcgtctgcttggatcagtattagatggcaaattatcagcagtataagcaatgtgcgtcaatttagcatgcttaacatcatcaattgtcttgcatcccgttaattgcatatcaatctttaattcatcatttaattgttcaataactgaagcaactccatgcgcaccacctaaggctaaaccataaagatatgggcaaccgattccaacaatgtcagcacccaaagccaaagctttaaagatatgagagccacgacggacacctgaatcaaagataattggcacccgatgatttactgcttgcgcaatttctggcaaaacatcaatggtagcaggagcaccatcaacttcacgaccaccatgattagttacgtaaattccatcagcaccggctccaattgctttataggcatcttcagcacacataacacctttaacaaagactggcaaacctgattctttcttaattcttttaacatcttcaggaccaatcttttgcgcagaagaagcgtacatttgagctacgctttgacctttaccttttgcaccaaggtaacgcttaaagaagtccaatggtacaggataagtaaagttagtccgcaagtttgcttcacgataacctgataccaaagcatcaacggttaagaaaatgccttgataaccagcttttttaattgcatcaaaaaccatctgattaaaattccagtctttactcaaataaagttggaaaaaccttggtgcttctggagctgcagctgcaatttcttctacactcttattagcataagtactagaactaaagagcgcaccagccatagcagcacccttttgcgttgcgacttccgcatctttatgtgcaattccatgacaagcaattggagcgatcataattggcgtctttaagtgcatccccataaaatcagtatcagtttgcggatcagccatctcagtcaaagcacgaggtacaatttgaaaatgattaaaagcagcagtattgttacgccaggtccattcattttctgcacccgaagcaatataataatatgcaccttctggcattaccttcttaacacgttcttcaagttcatccacattcaccatcttgattttttcatcgcggtcactttgtggaaagccttcgtagtagtgggtcattcgtttttctcctctcaatatatattgtatgttaatttcattatagtttgtaagcggttttgttgcaaattgatattctaaatttatatatgatcaatcaaatttatatataaattttagtaataaaaaaatatctgtgagactgtaaaatagtttgtgtaaggatgaatgattccttaaatttatttctttaaacattagaaaaaggagttcctttctcgtatgattggtttgaacaaaaaaacacatacagaaagaagaactccttcatgaatgattttaccaaagattttgctcaagctctattcaatccagacaaaataaatgatttattgcgcaaagagctacaacaggctgttaataacttgttagaagctgaattgactgcctttctgggctatgatccctatgccagaaatggctggaatactggcaactctagaaatggtgcttatttccgcaaagttgatacgcaatttggcccaattgaagtgcaagtgccccgggatcgcaacggtcaatttcatcagcacacgctgcctggctacaagcagcactcggatatcttggaaagcatgattatcaagctttactccaagggcgtgaccaccagggaaatagccgatctaattgaaaagatgtatggcagccattacagtccagctcaggtatcaaatatttccaagcagatgattccaaaggttgaggcttaccacaaacgcaagctaagcgacaagtttttctgcgtctatttggatgcgacataccttcctttgcgccgagaaacatttgagcgtgaagcagtctatattgccattggcatcaagcctaatgggcacaaggaggtcattgactactgcattgcgcctagcgagaacattgaagtctggacagatatgcttcaaaacatgaaatcccgaggcttaaagcaagttgagctttttctttctgatggtgttgttggcatgaaaacagccttggccaggacttatcctaaagctcattttcaacgctgtttggttcatgtcatgcgcaatatctgcgctaaagtacgcgtcgacgatcgtgaaaagatcatgaacgaattcaaacaggtgcatcaacagacaaacaaagaagaagccacagctgtcctgcatgacttctataccaaatggggcaaggtttacagccatgttatcagaagcttgaaagacatagaaccagatctgctggtcttttataactatcccaagcagatcagagcttcaatttattcgactaacatgattgaatcatttaacaatgtgatcaagcgcaaagctaagcctaaggcagagtttccaactgaacagtcgcttgatgcttttattggcattcaggcaatgagctacaatgaccgttatttcaatcgaattcataaaggctttggtcaggttcaggacaccttagaatcctactttgattaaataaataattaaaaaatcaatttacgagaaagatctatttacacaaaagatttgacagtttcatatctgtaagagcttacagcaaaagttgtataataaagacgttgacactattactgcaagaacttacttaaagcagattagtggcattttctttattgcatgcccttactggataggttgcactgcaaaaattaagaaaaagaggcataatttatgaaaaaaattttagcgattaattcgggtagctcttcttttaaatttaagcttttcacctttcctgatgaaaaagttatcagcgaagggatggctgatcgagttgggcttaacggctccacctttacaatcaaggttaaaggtgaaaaacaccaagaaaaagttgacattcctgattccgaaactgccgttacaatcttgcttgaaaatttaaaaaagtatgatttaattgacgatcctaaagaaatcatcggaatcggacatcgaattgttgcgggtggtgaagaatttaaggactccaccttaattgatgaaaagtcactacaaaagatttatgatttgaaacaatatgcgccgcttcataataccgctgaagccgatgtcattaatgccttcatgaaagtattgcctggcgtccctgaagtcgctgtctttgatacttcattccaccaaaccttggatccagtgcactacttgtactcacttccatataaatactatgaaaaatacggtgcaagaaaatatggcgcacatggcacttcggttagatatgttagtcaaaaagccgctgaaattatgaaacgcgacttaaaggacttgaaattaatcgtttgtcacttaggatctggtgcttcagttaccgctgtgaaagatggtaaatcattcgatacttcaatgggcttttcaccaatggcgggtattacgatgagttcccgttcaggtgatgttgatccttctttacttgcttttgtcatgaaaaaggaaaatcttgatgctgatcaaatgcttaaggttctaaacaacgaatctggtttgttaggaatttcaggcatttcaccagatatgcgtgatttacgtggtgacatgactaagctcgaaggggaaaagaagaagcgtgctgacttagctagaaacattttcattaatcgaatcattcgctatgttggtgcttatacccttgaaatgcgtggcctagatggtatcgcctttacagctggtgtcggtgaacacgactttggtgtccgtgaacatgtcatggattcactcgaacttttaggccttaagcctgattcagccgctaataaagaaaatgccaccattattaccaagcccgactcaactattgttggtatggttattccaactaatgaggaattaatgattgaacgtgatgttgtcagagtagctggcttaaagtaaaaaatagagaaaagaaataagacgaaggacaaaatccttcgtcttattttgcgtattaagccattgctttttcttttcgttcattatatgcgtaataaatccaagcaataacaccaaaggccactggaccaatagccgtccagaatgaagtttgccagtctccggtaaagagtggttctatacaagtaaagataattccgaccgcaaccactaaccaaacaacaattgtcgttgcccaaacttttttcttaccttcaataaaaacaaatggccgatctaagtcttttttagctttaaaaaatgggtaagcagcaattaaaaataaatatggtgctgatgaagaaacattcatcatatccattaaaattgtatagaattgttgtgctccattaccaccaaatgaaataaataagataataacgctaaccacaattgcttgtacccacatcgagaattcaggcatattgtgcttatttaacttaaccattttcttaggcaatagtcgcggatcacacccctcaataaatgatttaatcggtgaataaaccatcaaaaaggcagcggcaattcctgataacacatccgcaattccggccaaacgagaaaagacagttccaattgccagtgaagtagaatgtgatagacctaggctatgaccagtgacaatacctaaattattaatcaaaacatattcgacattagctaagtcaacacctttaccacctaacgatttgttccaattaacagccaccccacacataaagatgtttacaacataaagtgctgtcattaagaccatggccgtaatcagagccttaggataattcttttccggtttatcaactgaatcaattactcctgaggttgtttccagaccaccataggcaaataaagcatagacaataaatgaaataaccgcaatcggtgactgaaatgctggattaggtgaatgaaccatattttgtgcggtcactggttcagctaattgcccatgattcaaaataaagacaaaaagtgaaactgctgtaaaaccaatggcaattcctaaagtaaagatcccaccaatattattaatcgcctttattttatcaattccctttgcggcacaaaatgtaacaattactaagaaaataacttccaacacacctaataactgagttgaagtcagcgaccctaaatgccagcttggggtagtatcatgaccaaaaattgccgttgaaactgaaactaagaaaaattgggttgatgaaactaaccaaattacccaagctgccagccaaataaaagttccgataaatgatactttttcattagtagatccttcaagccatgaaaagattccacctttaattcctttaaaggaagcaccatattcagcgaaaattaaggctgatggcaggaagaataaaatagctgtgacaatataccaaatgatacttgaataacccatttgataaaaagctgtcagtgaattactaaatccaaaaatagaagaaaaaatcatcaagacaagactactaggacttatcttaacgtgatcattattcttcataaaaaataaaacaactcctttaacataaacaaacaatttctattatgaacttttatcatgatattttcaaaaagagcttttgcacacaaaaaaagcaggcctattcggtctgcttaagtaattaatcataatcttctggattaatatcaggtttaggtaaatctgaattattattcagcactactccttgaatgccattttcataggtccaatcttttaacatattcattttgccggttaaataatattgactaatcagcttgttccatctatcccacttatcaagtggggcattaattaaacctgctccatggtcaatcattaatttatttgcagctagtgtggcagtacgcttatttccgccccagaataattgattacgcatattatgatacatcaatgtcattgccttatctgtagtcgaggtatcgttgttcattaactcatcgaaaaatttttcttcttgtttgtagtttagattatctcggaagccatagcctgtcagtaataaatgtatctttagttcaatatctaaagataacaccttattttcattaataatatattgccatgctcgttttaatcgaataattctttccttatctttctcggaagccctctctatatttaacccatcagcaactaattgtgtttgaattaaagaaatatttgttttctcaaaatgcaaatcactaaatattagtcgagcaaggttagttctggcaaatcttctatttaaatcttgtgttaaatagaatttatctgggtataacatatttttacacctattatcttatcctctgcctcaacaattctggcctttgcgccagctctgcgtataaatgacgaccatttatgctaatcccctcaaattcacgccctgtatgaaagtgacctctagccagcactttacctgagcgtttcaatttaaacaaataatcattaaaggccaaataaatctgttttttatgcttgtcataggtaattccttgaacgggagaatcattgcgcataaaatctcctctagtagcgccaatctctttaggataccaactattaccctgacgagtaacttcccaatattcaaaacggtggtctgtggcatcatggtaaacggcaataaattggtgatcatttacaaaagtagcattatggaaataacgacctgttctagctgaatgattccaaactttaaaagtccaaatctgtttaatttgcaaattgtttttactaatctgcataatttcttctgattgagagctcttgcgcaataaatggttattagcaatcacataaatatactttcgagttgaaccgattgcttgtccatgtcccaatttaatatatgggcttatcttaacatgggatgcaagccgcagaaattgtgaccaaggtagccatggcaacttttgcatagtatagcgattaggcacttgattaaatttgtaagaaacaatgtgagcacgcgtatcattaggtgaatgatacattgtggcatacattgaaccatttgacacggtcaatccttctggtactagtcccaccgtcccagttaccgaatcactttgacataaagtcgcaggttgatagaaataggttttcagtttaaaatgaacactttttaaaacatgcgatttagtttccggcgcaaaacttctgccccaattaccagacgtcttatagtgcttgaaccagctacgagcactgtctccagcttgtggttttttggttgctttaacaatgccctctctagcattagctctcacttgaacaactgtctgagcatgagctttaccataagaataacttacccgatagctttcctttttacttgatgaaacttctgctcgagatactttaactttacttggctcaattatcgttcctgctgcatctgttgcataattaatcgcatccctagttggaaaactataatgcgaattcttcactaaactaatctgatgtacaactgcaatttttcttcttaaaaaagctcgctgattgacccaaccgcctctatgtccgtctaaccaaacatagcaatacttattgccgcgaacttttctaactgcactggcttgaacattgccatgtttaaacgtattagcaaggcatagacttcttgacggacctttacgagttaagttttgataaattctataagacgtatgcggattaatcatcttagtctgaaatggatttagttctcgcgcccaaaccatttgcggcttcaaacataataacgtcatcaaacaagctaatcctaaatagacttttactctcttcattcttatttttacaactccctaaaaataacgcaaagtctattgtaggtcagtgagtttttttatcaatattattattattaatttttagatcaaaaaagcgtaaaggacaataattcatcctttacgctacaatttttattaactttttctagttttgaacaattaagttcttcaaatcatctgataattgaactggtgcgtacttaacacttactactttaatagtagaggtctttaagtatctcttcttaccaatataagcatatctgctcttaccgtttttaacgatcatcgatgacttgtacttcttaccgtacttgatcttcttcttggttgccttaaagtaaacctttttagccttagcactcttcttatatgcgtagtagatctttgcacccttttttgacttaggtgaaacaacgatgtactttaatgctctattgttgtaagcatcttgaatggcttttttgtcactttgtgcttgctttgaccagtctgcttgacttggaactgttgctgaaggggtaacatcagtcgaaacaacataaattgcacattgttgtccatcagtgttgtccatctacagtttgactgtcaacataatagaaagtaacagaaccttgatcgttcttagcctcgttagaaaagtaaagctggatggtttgacctttagtataatttgaatccattgactttacgattttaccatcttggtttacagcgtaaagcttaggattagcattattaactgtagctgatactgatctacgcttaatactaatggtaccttttttgcttgaagtttgtgtagttgctgcatgaactggttctgcagcagacacacctgcaccagctaaaccagctgaaagcatcactgcggcagctaatgaagtaaataaattcttagttttcatcgatataatctcctaacgtaatctcttatagttaaattataacattttttattattcgtcaaggtaaagatacgttccccatttcaccggctcttgtttacttggctgaattgcaaaatacagaacaaaaatccaacctaacggtatcagcattaacagaatccaccaacctgtataattgatatcatgcaatcttcttacggctaggcctaattggcataatttcaaataaagatagatcaagccccaaataatcataccgataatgacaatcatcgaagcgtgatcaccattaaaagcaaaaccatttatcatatcagctgaatcattctcatagtgagaaactggcataacagttgccaaaaatgtaataattccaccaatccaaattataacttcagtaataacgattccaatccagaaacttcttctggtagttcttgcattccagataaatggtcgcagaaaagtttctttcataatttgatcaaaactaaaaactggggcctcaccatctaactttctttcaccctggtattcttgtttgtaatatggctcgctcatcgcttattttcctaattccacataaattttgacagctgctttaatagtttgataaacagttgaaacatgcaaagtatgagctaaaaattcttccttctcggctctagtcattgccgaatcaaagaagaccttgatcttcatctcagttactactgatttaccatgaccgagattctccgtttttgcctggttttctaccctaaaatttttaacatcaagttgatgtgctttagtaatcatccctgccgacattacaatacatgaattaacactactacatagatactcaactgggttgggacctgcatcatgtttaacatcatcacaaacaaaaacatgatcacgtacttggttggcaatttgccattctttatcttctaacttagatttaactacatattcgctcatattttccctctaatgatggtcaattgcgccattcaaacgcttacgccaaatgaaataaactactaaaatcaatggaactaagactaattctactggatagaaccattctatcggtaaagcagaatcaattacaccactgatcattgggccaaaggccatcgcaatgtctagtcccaaataaaaggtagcactagctaagccttgttcttcaatcggtgctaacaacagcgcagttgattgcaaaactgaataaatgatcccatagcctgatgccattaaagctgccgctaaagccatttgccaatcattattcattattgcgagcaagataatataagcagccgttgaaactagacttagccaaaaccagacgccaaaacgtactgtatcaaaatacctttttagtcctactctaataatcaacaaaacaaccgcatagatcaagaaatatgacccaactgcgacagtcagatgtttttgttctacataagttacaatatctgcctgtgttacaaaatacgggatagcaaataaagttgtcaaaattgctaccggtaaaacattaaactggataattttgaaactcttcttctgcgttcgaactcgctttttaggcaaagcatgatcacccacaaactgaatggccacaatcattaataaagcagaaacagctgatgctagcaagcttgtgcgataacctattttttgataaatattaattgaaactgctggtgctaacgccattgccaaagcattcattaagccataaaagcccattgcttcaccaacgtgttggcgcggcactaaaaaagcaagccaggtagtcatacaaactgtgcacaggacataaccggtgccgttaattaacctaaagagcaaaagccaaccacttgacggagtcaaaacgtagcccattactcctacaaaaattaaagcgccgccaataaacgataagcggtatttagaaaatttatcggttaaattgccagctaccggtcgcaaaaacattgctgctaaactcataatcccgacaatgattccagcaaaagcactgctagcgcctaattctttagcatatccattaatcaaaggattaacaaacattgtactaaacataaaaaagaaagatgctgccataaccaggacaacatctttggtataaattgattttctcttcgccaaaatgatcccccaattctgttctaattatacaactatcacagaatgatcatttagcaatttttaaactaacagtaaaaacaatgtcttcacctttgtggtgggctaaaattttgccatgaaaggcttcgactaactcttgcgccatagccaggccaatccccaagccacctttcttagaattatgcgactcatcatcgcgataaaaacgatcaaagaaatggctgtaatctttgcctttaccttcacgataggtattttctacccgcaagaccgcatatttgcttaaagttccgcccttagtcagtttcacctgaatcttgccatgaggatcacaatatttttgcgcattatctagcaaaatattaactacttcggctaaagtatgcttttcagctaaaacatttaagccttcccgcaccgatacttggtagactaagtcattcttcttcatgactgatttaaaatctttagtcgtttcttcaacgatttctgaaaagctaactttgcttaaggtaagctcacccgtctcgccagctcgagccagcgaaatcaaccgattgattaacttagttagtttagccacctgctctttattgctttcattccattcagaattattgcccagcatttcttccatttccgtattcgcggaaataactgctagtggcgtttttaattcatgaccggcattggtaataaattcctgctgcttgtgataagcatcaatcgttggcttaattgccttgcccgaaactaaaatcaaaactaaagcaaagacaatcaaagcgcctaagcctaaaactaacgctactctaaataataaccaaaaacggttaaaaatcagagtttcattcaaaaaaacaatcatcatttcaccagtagaattttttacaaccctaaaggcatattgattttgtcctaaggcaactacaccacttttatcaccattttctaaagctgatctggtaatagtctgtatcttggaattattaattttataaacgttattatcattaattacatgtacctgatggctttcatcaattgttaccgcaaaatagcgatactgataaaccgcttcgggattatactgcccacctaaaaaattgcgattaattggatcatgttgatcgccaaaggctggtttggcattttttggtgacaagcgcccttcatttttgaccaaagccgttagcacgcgatcgacttcattttggctttgaacatgagtcacccaaactaagccgcctaacgtcaacaacaaaactacaaacaaggcagcaacagaagtaccaataaacttccaccgaaatttttgaatcatctgctcacctacttaactagcttatatgaaccacctttatcgccttcaattcgaactgagctttgaattgattgcaatttttgccgcaagtatgaaacatagatccagactacctcgctattggcatcaagatcatttttccaaacatgattaagcaattcttccgttgataattccttattttgatttaataaaaaataatcctgaattgtcaaattaagtgcaacagttaggctatgaaggaacgtattgcttgaagagttcttctgctgtgtgatattggaggattcgacgatgtttgcggttaatggcatcagttgcctgttgaacataagcagctgacttatctttcatgcttttgcccttagggaagaattgacgcagaagtccattgcagttctcatttgtgcctctttcccaaggagaatatggatgagcaaagtagatctgacatcctttgattttggtcatatccgcaaactcagaaccattgtcaaacgtaattgatttaaaccaattaggatgtctgtcaatctccttttgaagcagtctttgacaagtactggcccgatagtcaggaattttgataacaacctcaaaacgagtggttctttcagtcagtgtcattaaggcaggttgatttttacgtctgacgcctttaaccaaatcgccttcccagtgcaggggaacttttctgttttcaacttctttaggccgctgttcaatcgaattgccaagattctttttatgcggagcatggccaccatgactatgatggcgtttgtttctgcgtcttttaagcttcattggcaggtcgatattgcttatatccagcaatccttgatcaatataacgatagacagtgggcgtgctaggacatggataatttggcataatcctgtgaaattcaccaacgaattcatcaatgctagtggcatcaaatttggctttaaagcgtctgcttagcattctgaaaaaaacggcatagtgttgcagtggattacacttatagcagtttctgcggcgcttttcatgataaatttgtgcagtatcagcgtaatagtgctcatacaagacatagctgctgtctctttgcaggacactgcctcgtctaatttcacggctgatagttgatttatgacagcctacttcttgagcgatagcagtgcaggaggttatgccagaatcaagcagagcttgaatttgtccacgttgttcgctgttcaattgatgataatgcttggaaatgctagaatttgagttggtcatgaagatcttcctttcttgatttttggtcacttcaagtttaggtcttcatggcctttttgtttaacaattagtgttgcacttcaattttaaatccgggatcctttttattctgaattatttgaatatctagccttttatttacaggaaaaaggatacgattgtattcttcatctagatcactatcaatcccaagatattaattactatttagagcgatttaaacaaaaggaaatcgctggactgatcaccagctctcctattaagattcctaaaaaaggactaaaaataaagtttcctattgttagctttgaccgtaaaattagtcctcaaataccaactgttcaatctaataactatgacgcaggtatgcaaatcgcacaatctgttctaaaacaaaagaaaaagaaaattattattattgctggtgctaaagaagactattacccaataagtgatcgaatcaaaggaatgattcgcgtatttaacacttttgattctaaattcgatcttcgctcactcagtgccagtgactcaattattgctaaaaaaatagccatccttcaatttttaaaggatgacaaatatgatgcaatttgttgtaccgatgacattacagctttactagctaaagaatgtgctgattatttaggaaaagtacctttaatcacaggatttgatggtagtcatttgattcaaagtctttttccaaatttaattagtgctcggcaacatacaaaagaaattgctgaattaatgtgcgatttacttttacgtcaaattaatgatccctctgtttcattagaaagtgtttatacgctacctgttagtttaataaatcaaaattaaaatcaaaaaaacgctagaatgtagcgatctaataatcatacattccagcgtctttttataacatcttatgctttttcattctctgttcgaaaatcccgttaatcaactctgtcatttgttgtttttcttctgcggttggttcaccatcttcaaaagccttgtataaatcgggatgttctctagcgattaacttgcaagtgccttcaacagcatgcttgcgaaaaatttttggaatcttgtttagatattcttccttgactaaagcaataatcttttcgtttgtcatcatttttactatacctttcagttgatttctaaatattttaaatattaatatggatttacttgtaaaatcaaatcataatatccaaagaaggaaacatccctaccaattcattcagtaaggatgttctccatatttttattcaaatttccaatcaacagtccgcttaaatttttcacctggcaaaagcgtgatgcgtcccaaatcatcaccttctgctggcggcacttgtgcttcaaaagtaatcccgcaatacggaccaaagtcagctgtatacttgccagtgtggtcaaagccattaccagtgtacagaatcagagatggcgcattagtcgttaccgttaacttgtgtttagcagaagttagcactgcatttggcatattgccatccaagataaatggatgatccattccatcgcggttcttaatttgcggatcatcagcttccaatgcatccccaactcgcttcttctttctaaaatcgaatgctgttccatcagctttttccataccacgatcaggcaagccagtctcatcaactggaatataataatcagcattcatttgcagttgcaagtcattaatcattttcttttcacctaatgtgaagaaagtatggttaaccggattaaaaatagtcagcttatcactcatggcacccaatgaataatgcagaatattgttattatctaactcataacgagcgtgtaattttaaattaccaggataagcattatgcccatctggatcaaaaagtgttaaatcaacacgagcacctttttcattacaactaggtctaaaattccaaatttcagtatcagtcccaataccaccatgaatgtggttaggcccttcattgattggtaattgatgtaattctaagccgtgccgccataaacctcgtctcactcttccggcaatacgtccaaccgtaccgcctagataattacgctccttgtcgtaatcttctggcttatccagtgacaaaatcatattctcaccatcaagcaacaccttttccaatgtagcaccatagttcaataccttaactaccataccgtgatcattctctagtgtgatttcacaaagatctttattatcttttctgccatattttctaaaacttgtcttcatactcttgcccttcttttgtattcgctttcataaatattataaattatttaaccatcagaatatatgagttaccgctaacaaaaaaacgagatcaaacagatctcgttttaaacattgatgagttaaatctgcttagttaaagcggtaatgaacttatcccagccttcatcgccatctgcattattcttgaaaacaccagcatcttgcaatacttgttcaaagacttcaactaaagcttgctgcatcacagcgtcaacattctcggcagtaatattctgctctgctttaatttgatcggcccattctttgtggctaatagccatcttattatcttggcccaaccagtattttttaacttcttcaagttcactctttaaccgacctggcaaaatagcacggcccattacttcgatcaagccaatattttcctttttaatatgccacaattctttatgtgggtggaaaatacctaacggataattttcactagtgttgttgtcacgcaaaactagatcaagtacgaagttcttgccttcacggtgcataattggagtcacagtatgatgacgtgttttaccatcaaaagccttaatttgacgagcagaatctgaataatgatcccagaaattaataattttagcgcccaattcaatcaaatctaacgaattatcgctaatcaagcgcaagtcgctcattggccaatcaacaatgccagcaaccacttcaggataatcatcaaagactacatttttcttaatcttagctttcatcattggaaaagtatgacgtccgccttgatagtgttcatgtgctaacattgacccaccaacaattggcaagtcagcatttgaaccaacaaaataatgtggtaacgtcttttcaatttcaaccaaattaatcaaagtttgttggttgatgaccattggaatatgcttttgatctaagaaaatacaatgttcattgaagtaagcatatggtgaatactgaaatccccaagggcggccaccaatattcatgcgaataattctcaaatttgaacgagcatttttgccatatccaccaaggtaaccctcgttttctaggcaaagtgcacattgaggatatttcttaccagttgcatgagctgctgccgcaattgccttaggatccttttccggtttggacaaattaattgtaatttctaagccatgtcctttagagctggtccctgagaatacaacattcttggcaattgcttcctttttgacataattgttgttttcgcaaagtttataaaaccaatctgttgctttttcaggtgatttttgcattttttgccaaaagatgccattagttttagatggtgttggcgttatcaagtcgtatagttgatcattcaaaacttcacgtgaagtaacatcatccgaaatctttttattttgcacggctaaatcaactaattgcttaactgaagtttgttcatcattagcttcaacgctacttgcctcatcgccaactaaagcgcgaattttgttaatcacatatacgcgatcgagcggctcatacgctccactattaataacttcatccgcaaatttttcaataactttcatacttatcctcttgtctgattaaattctcttagttccatcaacaatttccgcatcatagaagctggcatcgtaaccgatcttgtcgcggtaaatcttgccaacatttttcttaaatgcctcagcttggtctttcttgacgattgcaatggcactaccaccgaagccaccgccaatcattcttgcacccaagacgccaggttgagcccatgaagcttcagctaaagtatctagttcttgaccagttacttcataatcgtaatgaagtgaaacgtgtgaagcatcaatcaaacgtcccaatttttccaaatctccattttgcatggcctttgttgcccgcaaagttctttggttttcactaacagcatgacgagcacgcttaatttcagtttcattattaatcagatatgcatattcatcaaaagtatcattatcaagctcacctaaagtcttaatatctaacttagcctgcaacttcttcactgcatcatgacattcacgaacacgatcattataagcagaatcggctaaggtatgtggcttgttagttgccataataataatttcgtaatcgcctaaagcgagtggcttatactcataatctaatgtattgcaatcgaggaagatagcactatcttttttacccataatgcaggcaaattgatccataatccctgaattcaagccaacaaattcattctctgttctttgacccatcttggctaaagcaatccggtcaacatctaagttaaattcatcctttaaaatgatgcccattagcatttcaatggcagcacttgatgatagccctgaacctgatggtaaattggctttgatataaagattaaaaccatgatcaatgttgtcatatttttcacgtaagtacgtaatcatgcccttgaagtagttagcccaaaagcgatcatctttctcaacagttgtgtcgtcaatatcgaattccacgatatcgccatcaacattgccagaaaacaagcaaacttttttatcctctcttgggccgtaaacaccataaacacccaaactaattgcagctgggaaaacatgaccaccattgtagtcagtgtgttcaccgatcacgttgattcgaccaggtgagaaaaagacatccttacctttttcaccaaaagttgtctcatattctttaagtaattcttccttattcattgtttttacctcaaatttattctgtaatcgttttcagttattagtatatctcttcattatcttttagtaaatagtttacttaaataaataaaatatttatttaagtaaaaaaacaagaagctagatcgtttgtctaacttcttgtcttcattaaggaaaaaatcatttatttaacaagtatttgtacatcccatgccttcatttgatcatgagcttgctgaccagttaaaatattttgatactctacaaatttttgtggcaattttctttcttcattactcatatttaaaacaaagtataattcttgcccagactgagtaactcgcttagtaacttctaacttatgactgtcgcccaccaatgattcaacgttagctgtcaaaacaatatggttgaatagctgcgtcaacccaatgtgatccaacttagtaccaacataccaggccttaccttgaccatatttattttccgtgactgcagccgttcctgcataaaactcattggagtactttgctaaaacttttgcattttctggatgaatcaagtcacaaaccaaacccgctttataatccttgccatttagtgaaacaattgtcttatgtcctggtacaattgcatcactttcttcaacccaaatacccataacgtcttttaacgggccaggatagccaccaagatagacattatcactattgttaaccattccagacatataggtagtgacaaagttgccaccatttttgacataagcattaatttttttgcttagccctgctttaaccatatataaaacaggagcaactactaaatcatattgactaaaatcatcatcgacactaattacatctgtcggaatattgcgttcataaaattggcgataataatctaagattgattccatataattaaaatcttgactaataccgtcaacgtactcatatgaccagaagttatcccaatcaaatacaatagcagctctagccttagttttagagcctaaaacagttgggccaatcttttttaattttttacccaaatcttctagttcatgaaagaccctcgtgtcggttctttgtgagtgggcaattacggcactatggaacttttctgagccgcctactgcttgttttaattggaaaaactgaaccgtatctgcaccatgagcaactgcttgcaattccgtggctgccatctgccctggtcttttcagcgggctatatggttgccaattgacttgagacggtgcagattccatcaacataaatggctgatgctttaaactacgcattaagtcatacaaaaatgctggtaaatacttaggtgcatcgtaggttgggtaagaatcataagaaataatatcttgatctttagcccatttttgataatcaaccatcttatttggtaaaccatggaaattagtagttacaggagtgttagtatcatactttttaataattgatttttccatctgaaaaagattttgtaaactatcagattgaaaacgtaaataatcaattgataaaccggcaacaatggtttcgctaccttctggtccccaggcgtctcctaactcattaggaacaacaatctgatcccaatcatgaatagtatggctccacacattcatattccaggcctcattcaggttatctagtgtttgatatttactcttgagccaagtacgaaaagcattttgacaattttcacagtagcaattgccgccatattcattattcacatgccaaacagcaatatgaggtttattactatatctttcggcaattttctcgactaatttactagctaaaacttgataattcttactattggggcaaaagttatgtcgtgcgccaaagacatgccgccgtccttgataatcaactcgtgctacatcaggatattttttaaacatccaagctggcatcgcagcagtagaagtagcaagtacaatatcaaaatttgcatcagacaattcttgaataattctatctaattttgaaaaatcatattggccttctcttgactcaagcaaactccaagaaaaaacattaattgtagcagaatttaaatccgcttttttaaaaactttaatatcttctgaccaagtgtcttctggccattgatctgggttatagtccccaccatataaaaaacgttttaactgtgtcattgtaattcctctacttaaattgtacatctaatactttttcaccatgctcaacaatcttaccagcttcaatttcactagattttacaattcgtcctggttgtgtatagaaggtaactacagtgtcctgatagccattcttaagagctaaattacgatcaaactctaacagcaagtcacctttttttaccttttgaccatcatcataataagtttcaaaaccttcaccgcgcaagttaactgtacctaagccgacatgaacaactacttgtaaaccattatttgaaacaatttcaaaagcatgcttagtaccaaaagtgaacctaactacaccatcaaatggagcataaatattgcctgaatctggtttaattgcaaaaccctttcctgggaatggcttaccatcttcgtcaattacttctgccatcttcattaacttaccgtctgcaggagcatagatagtctgatcttgaggtctaacttgagtattagattcattcttttcaatcttaccttctgcaagttgatcttttaattcttcaaccacttcggcatgtttcttttcagataaagttaccttagtcaaaaagactacgattgataagactgccaaagcaagtgggatatataatgccaccatattaaaggtgctaatatcatgagcagtcatgtctgcagcagttgcagaaccggtcatcccagcagcaattgcaatataaccaactaaagcattagaaaccgcaccggtaaacttatcaatcatcggccgaacagctaaaacaacagcttcatttctttgaccattcttaagttgtccatattcaattgcgtcagttaatgttaaaacagttaccaattgagcaaagttaatgtttaaaagaaccaagcccaagtccatcaaaaatacgttgtctctgccgaaaataaacaaaacataagctaaaaccatgcaagtttgtccagcgatgaataaccattttcttggaatgtatttgttcagaattgggaacattggactaatacagaaaccgataattgttgcaataacaccaactacccagaagtcatttggcttaccaataacgaatttatacatatagaacaaaacaccattggtaattacatatgctaatgagtaaagcaagtatgctaaacttggccataaaatctgatcgttatggaaaatagcaccgaatacttgacgtaaagtagtcttttgcttagctgagtttctaataatattatgcttttctttagtaccgaaacaaacaatcaaggcacatacaattgccaaagctgaaattactgccgcaaatgctaaccaacctggtgcaccttcctcatgtttaccagttaccgcataagtcacagctgtaactaatggaacaacaataattgttaatccgttccaaccaattgttcctgaaaaggcacctaaagaagtataaataccacgtgcatgtgaatcttcacttaaagctggtaccatgccccaataagaaacatcagataatgaataaaatacatcaaaactgatataaattagtacaaataaaatcgcaaagagaatccaacttttttgaaactgtcaaatcttttgtgtaaatagttctttctcgtaaattgattttttaattatttatttaatcaaagtaggattctaaggtgtcctgaacctgaccaaagcctttatgaattcgattgaaataacggtcattgtagctcattgcctgaatgccaataaaagcatcaagcgactgttcagttggaaactctgccttaggcttagctttgcgcttgatcacattgttaaatgattcaatcatgttagtcgaataaattgaagctctgatctgcttgggatagttataaaagaccagcagatctggttctatgtctttcaagcttctgataacatggctgtaaaccttgccccatttggtatagaagtcatgcaggacagctgtggcttcttctttgtttgtctgttgatgcacctgtttgaattcgttcatgatcttttcacgatcgtcgacgcgtactttagcgcagatattgcgcatgacatgaaccaaacagcgttgaaaatgagctttaggataagtcctggccaaggctgttttcatgccaacaacaccatcagaaagaaaaagctcaacttgctttaagcctcgggatttcatgttttgaagcatatctgtccagacttcaatgttctcgctaggtgcaatgcagtagtcaatgacctccttgtgcccattaggcttgatgccaatggcaatatagactgcttcacgctcaaatgtttctcggcgcaaaggaaggtatgtcgcatccaaatagacgcagaaaaacttgtcgcttagcttgcgtttgtggtaagcctcaacctttggaatcatctgcttggaaatatttgatacctgagctggactgtaatggctgccatacatcttttcaattagatcggctatgtccctggtggtcacgcccttggagtaaagcttgataatcatgctttccaagatatccgagtgctgcttgtagtcaggcagcgtgtgctgatgaaactgaccgttgcggtctcgaggcacttgcacttcaattggtccaaactgcgtatcaaccttgcggaaataagcaccatttctagaattgccagtattccagccatttctggcatagggatcatagcctagaaaggcagtcaattcagcttctagcaagttattaacagcctgttgtagctctttgcgcaataaatcatttattttgtctggattgaatagagcttgagcaaaatctttggtaaaatcattcatgaaggagttcttctttctgtatgtgttttttttgttcaaaccaatcatacgagaaaggaactcctttttctaatgtttaaagaaataaatttaaggaatcattcatccttacacaaactattttacagtctcacttttttgtgctaatccaaaaatgccagtaaacaaaactaataataaggcggcacttactaaagtaccaattaaaatccaaggtttgaatttgccccatctagttttagtattatcaactatatttcctagaataggatcaattaccaattcagcaattctaattacaaccatcaatcctgtaattaagccgatcagcttatctgcaacggactgattaagtccgctgaacatgctgctagtaataaaaataataaaatatgtactcatcacaccataaaaagccgagtgacctaagttacccaaacagaatgatgcgtaggaaagaatctgcttccctgacttgtcactgtgtgtcataaatttgccccctaaagcaatcattaattgtaatcgtttacacagtttagtatattctctatttttgttaagtaaagaatttatttatatttaataaattctttactgaaagctaaacaaaaagagaacgcattaaattagcattctcttttgatagtattactaaaaaatatttttatttactaattaatttacttcttaggcacaaaactcttgcgcacaactaaattagtattcatatttacatcaatgtgtgcccgattaggttgaataatcagattcgttagcatatttaatgccatatcaatcatctcttgttgatcaatattataagaagaaagtggcggtgaaacatacttaaccacattactattattaatacttaaaattgcagtatcttttggcacattaacattgttctcattaaaagcttgcaaaactccaactgccaaagtatccgaagcaattaaaaatgcatcaggcaatttatttttgcatttagccagtacctcttttcccaacttatagccattagcaacgctaaacgggccattaacaaacatcaattcatcacttttgcctctcaccttgatatactccgcaaaagcggtggcacgtacatctacttcttgaatatgatcatgcttaggcccaatgccacctataaaaccaatgcgctgatatcctttatcaagaaaaagatcaattgcattttttactgtcagcgttaaatttgggcgaatggaatcaaataattccggggctggattagtatcgacaaagaccccattaggcaaaacctcatggagtttttttagtgttgcattttcaattggcgccgcgccaactccgataaagccctgaaaaagtgatgcatgtttaatcaaatcatctgcatcataaaaagtcttcatctgcagcgactctgcttctactgttgaaatcagcgcttgctttaatgaagtaaaatattcatcttgcagttgctcttcatgatttactcggtatagtaacgcaattgttggacggatcttcttttcctgatgatccttccaatagcccaatttattggcaatttctaaaatcttgttcttagtatcagccgtaattgacaaattaggatcattatttaataagcgcgaaaccgtagctgaagaataccctgattcttgtgctatttctttaattgttgtcatatttatatcttttctatcttaaataaataatttttaactttattatacaaaatatttacgtaattccaataaatatcataagcactttgtcattcgttttcgagtcaaaaatattaatcttcaaaatatttttcagtaaataatttacttattaagtaaatttattatctatgtgttataatataagcgttttcaaggttaatttttttatagaaatcaggtattttcatgaaagcaaatcttagctggcttgatgaccccgaagttttccgcgttaatcaagttcctgcccacagcgatcatccctatttcaagaactatcgcgaatggcaaaagcaaactagtagttttgttcaaagtttaaatggtgactggtgttttaagttttcagctaatccacaaacacgacccgttgatttctttaaaacagatttcgattcttcatcatttgatcacattccagtcccaagtgaaattgagctaaataattacgctcaaaatcaatatattaatacgctctttccgtgggaaggaaaaatttatcgtcgacctgcttacacaatcaaccaaaaagctaccgactcttttagcaaaggtgcagataacacagttggctcttacattaagcattttgacttaaattccactttgcgaggtcgtgatgttcacattgtttttgaaggagttgagcgagcaatgtatgtttggctcaatggtcattttgttggttacgccgaagatagtttcactccttcagaatttgatctaacaccttacattaaaaacaaaaacaatattttagcagttgaagttttcaaacatagcactgcctctttcttggaagaccaggatatgttccgtttttctggcatttttcgttcagttgaattgctcggcctacctgagacgcatttaaccgatctcgatttaaaaccagaagttacaaataattaccaagatggaatctttaatgctcaattgcactttacaggcaaaaatactggctcagttcacttgttcgtagaagatattaatggcaaaactctacttgagaaaaaagcaccaatcagcttaaccataaaaattgaaaaagaattattcaaaaatgtgcatctttgggataaccatgacccatatttgtaccaactaattattgaagttcacgctgaaaatggtgatttacttgaactaattccttaccaattcggctttagaaaaatcgaaattaattctgacaaggttgttttattaaatggtcaacgtctaattattaatggggtcaatcggcatgaatggaatatgaagcgtggccgcagcatcactttaactgatatgaaacaagatatacatgcttttaaagaaaataacatcaatgcggttagaacttgccattatcctaatcagattccgtggtactatctctgcgatcaaaatggaatctatgtcatggctgaaaataatctcgaatcacatggtacttggcaaaagatgggacaagttgaaccttcagataatgttcccggttctattcctgaatggcgtgaagctgtaattgaccgtgcccgcaacaattatgaaactttaaaaaaccataccgccattctcttctggtctcttggcaatgaatcatatgccggagaaaacattgcggctatgaataaattttataaagcacacgatcatagtcgcctgacccactatgaaggcgtggttcatacgccagaattaaaggacaagatttctgatcttgaaagctggatgtatttaccaccaaaagatgttgaagaatatcttaaaaataagcctcaaaagccatttttagaatgcgaatatatgcatgatatgggtaattctgatggtggcatgggttcctacattaaattgcttgaccaatacccacaatatttaggcggctttatttgggacttcatcgaccaagcgctattagtacacgatccggtgagtggccaagaagtattacggtatggcggcgactttgacgaccgacactctgattatgaattttcaggcgatggcttaatgttcgccgatcgtacaccaaaaccagcaatgcaggaggttaaatactactatggcttacacaaataatttacatataatctatggggatgctactttaggcattaataccccagataagcaatatattttcagctatgaaaaaggtggcttagagtctttaaaaattaagggtaaagaatggttttatcgcgttcctaccccaaccttttggcgtgcaactactgataacgatcgcggcaacggtttcaacttaaaagcagctcaatggctcggcgccgatatgtttagccactgtactgaaattcagctcaaagttgatcaacatgattttgcagatttgccaatcgctccactcaacaaccaattttctaatcatgagtacgcaagtaaagtcgaaattacttttatttatgaaactttaactattccaaaaacaaaagttgaaattacttaccaaattaacaataatggtcatgttataattaagatgcgttattttggtaaaaaagatttaccaccgcttccagtaattggaatgcgctttatcataccaactctagctagtggctttgaatatgaaggcttatctggtgagacttatcctgatcggatggctggagccagtgctggctcttttaaaattaagggattgccagtaaccaaatacctagtgccacaggaaaatgggatgcacatgcaaacgcatcaactcaaaatcactagaaatactacgctcaacaatgctgatcattctaatgaggattttgacctcaccgttgagcaaactgataagccattcaacttcagttgccttccctacacagcagaagaactagaaaatgcaacgcatattgaagaattgcctcttgcccggagaacagttttagtaatcgcaggtgccgttcgcggtgtaggtggcatcgatagctggggtacagatgttgaagatcaatatcaaatcgacccaagtcaagatcatgaattttcatttagactaaattagtgtttttaaataatttatctaaaataagtaaattatttactaaaatatgtgttataatgtaatcgatttcaataaaagataataactaaaataaaggagcgcaaaacatgaaagttttagttgtcggtggtgcgggttatatcggctcacacgctgtacgcgaattagttaaagaaggcaatgatgttgttgtcttagatgctttatatactggtcacagaaaggctgtagatcctaaggctaagttttaccaaggcgatattgaagatacttttttggtaagcaaaattttacgtgatgaaaagattgatgctgtaatgcactttgcagcatattcattagttccagagtcagttaaaaagccacttaagtactatgacaataacgttactggcatgatttcattattacaagctatgaatgacgctggtgttaaatacttagtcttctcttcaagtgctgcaacttatggtattcctaagaaattgccaatcaccgaagacaccccacttgatccaatcaacccatatggtgaaaccaagatgatgatggaaaagatcatggcttgggctgataaagctgatggtattaagtacactgctcttcgctacttcaacgttgctggtgctgcaagtgatggcacaatcggtgaagatcacgcaccagaaacacacttgattccaaatattttgaagagtgcaatttctggggatggtaagtttactatctttggtgatgactatgacactaaggacggtaccaacgttcgtgactacgttcaagttgaagatttaattgatgctcatattttggcactgaaacatatgatggagactaataagtcagatgtctttaacttgggtactgctcaaggttactccaaccttgaaattttgaacgctgctaaaaaagtaacagggattgatattccttacacaatgggtccacgtcgtggcggtgaccctgactctttggttgctgattcaaccaaagcaagaactattttgggctggaagccaaagcatgaaagtgttgatgacgttatcgcaactgcttggaactggcacaagagtcacccaaagggctacgaagacaagtaaagtataataaagatttctataaaaactaatcgtttttcaaactattttctacatctattatctaaaaaaatgacgctggttcgatcaactagcgtcatttttgattgaaattatttttcaaactctaatttagttagccaagtttgaactgcctgaataacttgagtaaaagtgattcccttagcaaaaggatgttttctcacgtatctattccaaagattctgcatattactattttcagcaataatatctacttgtcttagacaatacttataatctatatcttgtcctgtccaaaagattgattcacggtaattcgtagtattagcaaaagctgactttaaagtagctaaattgattcgttctctctgcagtatgaataaatcatagagatctttcatacgtgtattagctattcctctcgtaattaccgtttctaatttttccgctactatagtttccatagtatatgcccaaatattaatatgtcgatcttctaaatgtaatttatagctatattcaatctccctaggtgtaataacatcccctgttgaaacatctacttttaatggatatcttatcttccgaaaagaagcattaaaatgtaatcgatagcccttgtactcttcatgctcatgaatctgttcaatttctgacaacgaaatgcttaatagatcccccgctaattttatttgacagatttcttcaaatactttagctatttgtttttcggtcaaatctaatccttttatctcagcatcaatgtcttccgtggatcttttatcgataccaacaatagccgacaacaaaaaaccaccttttaaaatgaaattatctcgatattttgatactgaaattctttctagcaaatcatctaacataatttcttgccataatcgaccaatctcatttccttttatattatgctctctagcataccttcttacatctgctttgaactgcttctcatcaacataatttttcacaacaacacctctaagtagctatttacctttctagttaccctaaacttttctgcaaaagacattaatgtatttatgtcttttttcttttccttattccacatcttgaaggcattggtaattatttcgatatctacagcattaatcggtcgcaatatttcagctagagttctttcaggagtatagagattaatcacatttccattgaatgattcagtttgagttattccctgagtagccaaacttttagtttgaatatgtggatttatttcaatatccaaagttggattattgtagcccctaggaaaagtcatatctaagctaaaaggatattgatcacttaacccccataaatataatgctgtttctaaagaatagattccttttttatatttttgttgcaaactataaaatatatcctcggtatcatcaccaaataaataaattcccggacgtattttttctaacgtaccatcctgaacagctttcgaaatactataacttgatactccatttaatgctaattcacgatgagtaattgtaccgttatgtatttttgctagttgactaatcaatgatttttgtttcataagtactgtcaatatacgaatatggaattatattacctacaattgaaaaatatatttctcctttcattatttcgaacataagtttaatgaattacaaatataaaaacaagcgaacaaattattaagattttattatttccatattcttctttttcaattgcttttttacttattttactacactttactatgtagtgtagtaaaataagtaaatttagtgtccataaagtaagtaacattgattcaatatgacttactttatggacactaaactattatcctcaagtttggtatacaccagtttcttgctaaaagttgtataatgtaaacagtaaacaaacaaggagcatctttatggcaagtattagagacattgcacgtattgctggggtatcgccagctagcgtatcacgaattttaaacaatgatccaacttttagaatcaatgaggctagtcgtgcccgcgttatcgaaaccgccaaacgcctgcattattcgaaatctcaaaaacatcctggtcccaagcaaactgataaccagctctcgattgcactaatcatgcgttataacaaatctcgtgaaatcaccgatccctattttctcaatctgcataaaggcattaatgaagaagccaagaaatggcatttacgtattgagcaaccttttagaatagaagatgataataaaaattgggctgacttagctaaatttggcgcagtgctaatcgagggtgaaatgacacctgtagcaattaagcagattcaaagcattaatccccatataatttttatcgacgtcaacaccaatattcataattgtaatatcgttcgtaatgattttgtggaagaaacttctcatattcttgataccctctataacctgggacacaagaacattgtttacatcggtggaaaatcattggttcttgatcttgacggtaagattgcttgtgaaaaaaatgatctacgtgaactcacttacttgtcctggatgaaactccacaatcttgaccagtactgccattcttttattactgattggtcaactaactctgcttttgaagctggaaaagagatcttaaaactgcaacaacgtcctactgctgttgttgtcggtagtgatcctatggcattaggtgtttataaagcctttagtgatgcaggtgttaacatccctgacgatatctctgttgttagttttgatgatgtagatatcaatcgcttcttaactcctaccctatccagtgtctatatgaatactgaagaaatgggcaagactgccgttcgtttggctaaagatctaattacggaagatattcaaattccacttacgatcacttgccatagtcaattaaatatccgtgactctatttctaagaaaaaataatataaaagaaaagcctcgaaagcactgtactgagacgtaaaaagtagacaattaaaatattggattaatagaggcttgacttcgatactctttcggggttaagccttttaatctgctctttatcctttcgttgttatagtattcgatatattcctcgattgcttgagttaattcttgaagattatgatacttgtattcttgatcatagaacatttcagttttgagcaggccaaagaagttctccattagcccatcatccatggagttgccctttctggacatgctttgagtaataccatggagttttaaagctcgctgataacgagggctttgatactgacagccctgatcagtatcaaaaatgcagttattaagagctgtttctttggcaaaagccttgtcaagcattgtcattactaaatctatatctggatgtttggagatagtataagaaactatatcgccaccgcagccgtctagaataggcgataaataaagcttttcattattaagatgaaattcagtgatatcagtataccattttgtgttaggcagggctgcgaagaaatcacgatgaattaaatttggagctattttgccaatagtacctttatagcttgaatatttgcgcttattgcgcctgatgcctttaagacctaatttatgcatccaatagcgaacggttttctccgtaactttccagccctctctgattaactgcaaagctactctgcgatatccatagcggccttgatgatgattaaaaatctcatggattctagcaataagctttgaccgtttaggcttgacgggctgtcgtttgataatcttgtagtatgagcttctggcaattataggtagctcagggtgctctgcaatcgcagctaatacataatttaaactaactttgaattcttgccttagatccgtaatcaccctagctatttcttctgatcttcttgatccaaggcacttagtttttttacgtattcgttcacaatacgcaatcgcaagttttcttctttcagctgctggatctctttctccagttccttgcgagatttctgcttttctttggtcacgggcagggcgtcctttctgtttgataatgacattatacccgtttttcttatattctctaatccaattgttaagcatgccaatacttttaaaccccagttccaaaggcagctgtaagtatggtttattgccaaagattgcttgttcaatagttcgctgcttaaactctttggaatagctttggtttttagtagttaaaatttctattccatgcatatcaattaatctaagcatatagtctaaattagctagattcattctgtacgctttagccaattgactgattgagatattttcatctttccatttatgataaatttctattttttgttctttattaaatttagacatagtaaacattctaagctaaatagtgaattagttatccgacgggataattgattcactatttttattcttttgtagaattaaagtagtagtaaaacgatatgccctgaggtctttagacacttgatgtcgtatacaaaactggcagttttacttaagttttcaatagtctcttcgaagaatgtggacactagatgtcgagtttagaaaattagatctgatttcttaagtaaatacgttttactactaagttttggaggtttttattatgcaagttacttttggaattgatgtaagcaagtctacttctactgtttgtgaactaattggtgaaagcaaaaatgaactaaccattactaataatcgtcctggttttattcaattgcttcatgaattaaccgctttttctaaacatccgcaaattatttttgaagctaccggtgtttattcacgtacactgcaatcttttctggaagactatggctatgattatgtaattcttaatcctcttaaagctaaaaaagaaatggatatgggactacgtcataataagactgataaaactgatgcttatcatttagccttaattcaaagactatatcatcatccaattaatcaacttcaatctcaaacttataagcagcttaatgctttgagccgcttctatgaccagttaacagctgacttagtaatggctaaaaatcgacttcaccaagctctacaatcgacttttcctgaaattgaaaatctattttcttctgctaaaggtaaaaattactggcaaatagttgtgcgatatcctcattgtgacttagtaagaagagaagataaaaaacagcttattaactggttaatgagcttaaaggggattgcttttaaacacgctctaaggactgcagataaattaattgaattagcttatcaagcttatccagttgtatcttgctctagcatagaagtcgagcaagtgcagtattatgcacacagattgcttaatttaagtgatcaaagagaaaatttaatcgcaagaatggttaagttagcgaagtctttgcctaatcatgatttagaaaacctagaaagcattccaggctttgcacagaccactgctgtcagagttttagcagagttaggagatttacgcagatttagtaatcctaataaaatcaatgcttttatcggaattgatccaggcagatatcagtcaggagaaatggactctaatttaagtattactaaacatggcaatgcagtcgcacgtaagttgctttatcgagctattggacaaattgataatgcagctaagacaaatccgtgtcatatagcagattattatgaaagcaaaaagctatcctctcaaaccaaagggttcaaaaagatagctattgcttcaattcataaactaatcagaaccatttatgccctgattatcaatgatcaaccatatgattacaacgtagccacacataatcaaaaagactttagtcgtaattaattgatcaagtacattataacgctaagcccaaaaatcagatatggatctgggcttatttgtcgtgtctaactaaaaaaataaatcgacactaaaagatgtttaagttgaaatttaaacaaaaaatgaagtcaaacttcttattatgcttgactttacgtagaaaaagtgtctgggaaaaaactagcttccagatgaataaaaacgatcaagatttccttttttaagaatcttgatcgtttttttgttctctttaaaatttttaacaataaaaatcggcccttcagccaccttctttgacaatatttgttcaaattcatcatcataaaggcaattccgatatcggtttcgaccttctctttacctcgcaggtgcgttctgcgcatgccaaatacgttcttcaaatgtccgaaaactggctctacatcatattttctcatgccatagatgtgtctgccttcttcgctttggagaacttcttttgctttttcttttaaatattgccagttaggattatagcgaacttggcgctggcggccgctagctgttttagccaattgttccaattctggcgttagctggaactcgtctgcctcataaaccttaaaatcacggacctgaccagtagaacgatccttgcgctggctgtaatatttgaaattgaatctgacgccatgatgatcaatgtaataatcatctttttcattgtagtaccagttgattagcttagttggatcattcttatactttttggtctgttctttttcatacatagtgtagggaataaagtacttcttgtctggatatttttcctccagcatcgaataattgtattcactgccatagccagcatcggcgacgattttgtcaaacttgtccaacacggtcatttgatccaaaaccggctccaaagttttgaaatctgtcggattaggaaagatggcataatcaactacatattgatcggtcgtgactgcttgaatattgtagccaggctttaattgaccatttttcatgtggtcttccttcatatgcataaaggtggcgtcatgatctgttttggaataactgttgcgtccggcaaagatctcttcggcttcttcatatttttgcattcttggcacataatcttttcttagccggtgcagaatcttttttagtccacgtcgcttggcttttcgaggtgaaccgccaggaatggctttgttttcctgctcaatctctttagtcagcttgttaatttctgcttcagtttcttgagctaattcctttagcccctgactagtttgaactttttctttttccatttctttgactacttctttagtaatcaattcatcataaagttcaactgcctggcctttcagcttttcatgatacttttcaaccgctttgcgccagacaaatgtatagcggttagcatcagcttcaatcttagtaccatcgataaaagcagcaccttcattgattaagccttcatcttctaacaggttagtgaagtagataaagctctttttaatcagttcattggcatggctgcttgatctaaaattattgatagtatgatatgaaatcttttgctggtcagccaagatcatcattggcagattttcttccagcatcaactcaatctttctgccagaaaaaactcttctggagtaagcaaaaagcagtattttgagcatcatggctggatgataggctgggcggcccgttttagcagtcttgcctactaaaacatcttctggaattgaatctacaaaccagctgatgacattagccaaatgattggccggaatggcaaaatctagattaagtgttaaagcagtttgacctgtgatataattcttgtacatgttagtttccaccttttttattttgtgatgatttaataatatcaaggctggagctaaaagtatacaaaaagagcgttgaaacaaaaattcaacgttcttttttcatgatctgagacttagttttttcccagacactcagttcactatttactcgacactcgcttttacaatatctcccttgcccctattcaattccatcaaaacgataaagtcagctttttggagttgactccaaaaagcagcaataaatgtcatttgtttggagttcattccaaacttttactaacccttgatactatcaatcccacagccaactacgacgggattcaaaaaatcaatcttattgattggctactacaataattacaacgtaaaaaaccacattactcacttcaatttttgagcaatgtggttttatttttctgtaattttaatgctttctacaacctaccattctcttcatccatggttcgttccatcaaatcatgaactgcatccatgtcattcagtaatacttcctccttagctgttaaggttctctcttccttggcttcagtcaacatacgatgatgccaacccagaatatcactcaatctagtgtacattataaagcccaagaccttactatcttccaacagctgacgtagttctttttctggctccttatagcgctcatcttcatcccaagcagcaaaatcatcaataaccttttccactaacttatgaagttcttcctcgcttttcattaactgtattctttactatttgttgtttacagtcaaccacattttgaaaaaatctcacataatagaaatttaatcatattattcaaaatattcttaagcaaattaaaaagagcccagacaggtgactaaaccgtttgaactcttggattaggaaacttttttagtttcaaactacaacgtcagattaattattgaatttcttgtagttttggatgtagcgcttagtgcggcagccaagcaagtcgccagcgtgttcccattcagtatacttagaagcatcgcccatttggctacttgagccagcaaagccaccgaagagcatctgcttaacgttgaagtagatttggctcttcaaagccgacattgtacggtagttggtgttaaattctgaagaaattggcaaacctgcttcatcttcgtaaacttgaccaacacgtgagttaagacctgaagccttggctgcacgttcaataccagtaacatagtgatcaggatcccagcaagacttgttgtttgagtaatattgattagctacacggtcagcaaaatttaatgcaccgcgcttgtaagtccaagattgcttgccaagttgattacgagcagaattaatcaattccaaagtgtagttgcttaattcaactttttgactatcagttaacttagttacattaaccaaggtgttgtctgaaccagcatcactatcattattttctttcatacccttaattgaggcatttaccaaagccttgctggccttaccagtttggttccatttgataacggcatccttggtgtaaccagaaggtaatgttattgatgcagcatcaacatttgaagtttcttgattgttaactgcagtaattgcaccacctgctaaagcaacggcaatgctaattgttgataaaagtttaatgctctttttcattttcctaatcccctatttattatttatgaaagctcgaaatttttaagtccttattattttcaagctttaaatttaaactcatttatttaagaagtagtcggtttcttaaacttcgttataagtctcttcacttaatagggtagcaggttaaataaagaagtctatatgcgtaaatatttaataacaaacctagataacatcttaaaagatattgaaagctctttcaaatgcgatagcattaggttaagcaaattaaataaccatttctatataattaactgaaacttgaaagctaagattaacgctctttccccgcgcctcttggctttttcttatcaaaaataaaaacgcaggatctctctgcgttatactttaagtgtcgacctaaaaagtaaaggagatcctgcgcaatgaacagtatagaacaaatcgacacagaaaacgatactaaatccttaatttcttcatttattaatctaattggtctagctaagttaactaaacaagtcaattttaagcgtaaatccaccgtttcattaaccatgattatctcttggctgatgtcagtacattttgctcggctttctttattcagagctaaggatgacaaacgtttttccgttagaactgctcgcaatgtacttaacgatggaagaatcaactgcaaaaactattatgcttgattgcagcccggctcattggctgcttaaaaccatttatcgataaaagacgccgacttgcttttatcgttgacgatacgctgatggctcggtctttttctaaaaagaccgaattgctagctaaagtctatgaccatgacaagcatgagtatttgaacggatatcgtggtttaactttaggctggagcgatggcaataccttcttgccggttaactttgccttgatgtcaaccaaaaccaagaaaaatatgattggagctgctcccattactgctgatgaacgttcaatttctggtaaaaggagaaatcaagctcagagaaagatgaatgatgtaactgtagagttgattagacaagccttacgattaggagtagaagctaaatacgtcttattcgattcttggttttcttctccaagaatgttttggattttaaagaagatcggtttagatggacttggcatgatcaagaagagttcaaagatttattacatttatcgccattgccgctatagcgttaaagacttgtatgatcgtttggctgcttcaaacatccgtaaaaagaaacattatctttattcaagcatagttgaggctcaatatcatggacatagctttttattaaagctcgtctttgtctccaaccgtggaaacaagaacaagtatttggttttagctactactcagacaaagcttagctctgaagaaatcatccaactttatggtcgtagatggcaaattgaaacatattttaagacgtctaagcaatatcttgctttagataaatctcaagttcaaagctatgatggccaatgtggctatatcgcagttacagcaataacttatgatctattgacctggcaggaaagacaaaatacagatgataagacaatcggagatttattctatctaatgaacgaatccttacctgatattagattcgtagatgcattggtctacttaatttcagaattaaaagagcttaaacagaatagttttgaaaagatagatgaagtaatcaatgactttattaaccaactgccacgattcatacaaattgcactgaaacagatcatataaaaactaattacgtctaagaaagctcaatagtgacaggacttgagcttgattttggtgctttcaattttcagataattaataaacaatttcgaatttttttacttctgctctaaaatatataatatattatataaatataaccatagttatcttcattaggctaaaaagctatattaaataatccttgttatatcagcatttaaggagattttatacaatttaaatatacacatatagacttcaaactgcctaatcatttataaaattacaaatcataaaaaactaccaagattctcaaaaaagaaaatcttgatcgttttcaatcatctggaagggaatttttcttaagaaagattatttagcaaatcccaccttataccaaatcgaatttgattcagccggtttaagtgaatagttaaccagcttgctattcacagccttaatggagtaagaattagtcattggcacaatataagcttcatcattcatatattgctgccacttatgaaaggccttaacccgatatgcatgattaaacgccttagacgaatcaatttcattgagtaatttgttgttctcttttgtcacaaatcttgagtcattcattgcactagtttcactatagattcctctaggtgatggttcactagacaatgaccaggaagcaataaacatgtctatatttttatcgtcttggtctaacttatcatagaaagaattgaattccattaatctgtttccagttaaactcacatgaagtccaatctttctccattgttggatgtagttttgaataattggttcttgaacggcggacccactcatagctgctaaatgaatgctcaatggttttccgttaggttgaactctccatttgcctttcttcttatatcccgccttatctaacaattcacttgctttctttaagttgtaaggatagcctttagaatttttatcaaagtaatcaccaaattgttcaggaattaaggttggcactctaaaagtcaaaccttgcgtgtatctcttttcaacttgattaatattcattgcataagcaattgcttgccgtaaagatttgctattcatcttagaattaggattcataacattcttaccatcttgccatttacccactttgaagccgagatagctgtaagcaagaggaattttagcaatgaattttgtatctttcgcatctttaactgcttgccattgtgaatttaccacatcggctatatcaaacttatgactcttaatagcttgggatgcggaattagtagaaactacctgagcaacaattttgcttaattttggtgtacctctccagtaatatttatttggaacctaagttacagattgtcctctaactaccttgctaactttataagggccaaaaaagataggattttttctaatttgatctgatgaaaccaatttactgaaaggaatattctttagataatgatacggagcagcagtttcaataaagtaatcattacctgattgcaacataccaggcttcattgaaagaaaatgaatgacaatggttctgccattttcaccattaggaaattgaataccagaaatagtttttgcttttccattgtgataagctttcataccaacaatattttctaaagaatctgaataccgtaaactattagttgctttgttggcagtcatttcatatggatattctaagtctttagctacaacttgcttaccatccgaccatttaacacctttttttaccgtaatagtaattgtctttgcatttttatcaagtttaaaagtagcaggtcctttattattaatttgatatacgcgtggtgctagttaaatcgttctaggcaatatgccatattataagctaaaatggctatttctagccgctgctgaaagccagctaagctccttgctcggttattttcagcgttatagtaactgagcaaagaaaagtcgctttcaattgttcttctaattgccatcagttgatgattattatgttttttagcacctttcatgttttttcgatatggtgtccaaaggacatagcccataccttttaactcggcagctaagtcttttcctaagtagccttcatcgcctaaaagataatggttaattggatgagcattaatcatcaattctactgtttctttggcatcatgcactgatgctttagtgactgcgtagtcaagcaaatagccatcatcgcttactagcgcgtgcaccttgaaaccataataatagactttcttggttgctttatagccaatatcggctatgtcacggaagatcttaacacgataattacgaacaggctgacaaactggaacaggaaaactgtcaataattaaaaattctccagcaacctttacctcttgattccaagcttgacggatgcagcgaattaaaggcaaaagcatcttggctcgacgattaaagcgagaatgagataagccaacaaaaaatttacagaatcttctttgggattcaattccaatttcagtttgccaaatgagcatcgctaagatggagctgtcggaaagctttgtttgatcaatgttttttcgatgcgtaagcttatcaggcgcataaagattatatagtgaacgacaaattacatttaaacgactaaaactaacttgtaaatggtgagagaaacgattaagcttgaggtagttcaattagatcagactcttttctatttaatttacttacaacttgagtctaatccgattggacttttttattaactaaaacgatttaactagcaccacgcgtatttgatatgaattatcagtatcgaataacccctcattaccaaattgcatgacatcagaatcaacttgatcaactgataattgactatcaaaaatacctttaaaaggcgtatctgtttcgattgcgtagtttaaagtgccacctttctgtgcagttttttgtacagtttgttcaggaaatttctttgcactttttgctgcatttgtattgctttgaccacatgctactaaagttaaagcagcaccaataagtagaccagttgaaccaaataatttaattgacttcatagttttttctcttttctgtaacaaaaaaaggtccacatcccaattaggaatgtgaaccttgcttagtaatcaacttaattaattatttttaaacaaaattcgccgcacaccataatttaggatcacaaaataaaccatcattttggtggcggcgtcgtaattctactgttgctgaattttgtgattctaacatgatatgtagctcctttcttaaataattttaatattatgctaatcttattttattgttttgtcaataatgaattttgaattttatcgataatctgattcatcagttttaaaatgtttgtgtgaagggatttcatgagaactacgctctttttataaaaaaattgataagagacaaaagagtaagcagatatagacttctgctcactctttattttattgtaaaaagaaaaagaaccgaatcaaaatgattcggttccaaaagcgtcaaatttgtcaatgtcttaacttaatgatactgtcactaacttaaatcaaacaaaagcaaccagtatagatcttttatctacactggttgctttattaattgatattgcagtatggccttactactgcattgtatttagaattatttgtctttagcttcagtgcttctttcgtactagtcattttaacttaggctaattccactcaatactaatcttgatcgcttttttcaacgtttgatagacagtagatactcttaaaatatctttaacaaatttatcttgatcttcatgagacataggactatcaaatgatattttgatagttatcgtatcaacatctggcattccgtgtgataatctctcggtattcgcttccgcattaatcttaaaattttgaacgtccagatggtgcgccttaataagcaatccagctgaaatagacatacaagaatttaatgccccagttaaatattcaacaggatcagggcctccagttttatcaccattgtcagctataaagcgatatctggcagttgaattttcaatttgccattcagtatcgcttaattcactatttaccacatattttgtcatttttccctccactctacaactattctgccttaagttttcaacctaattatactctatcgtggatctagttcgtatatgttgttttgcaccccgatgagatcacggacattaaaccaaaagcagtccatgatttctcatgaactgcttagaaagagatacttctaatattttcgaatttttattgatgttactctgtgacctacatctttataaagaatgatattagccctttccttggttggtacaatatagtcacgtagattaactaaattaactgtccgccaaaccttttttgcataatcaattgattcatctaaaggaatatgagcccaatgataaaagaaattattaggattatctttattaatatctagcaaacatttaaagcgagttaagaaccattcctctaataagttttcactggcatcaatatagatggatagatctatataatcactgataatcttctcttcattttcaggaatttgcaaaatatcgattccttctaaaatcaaaatatctggattggtaatgctacgatatttaccaggaactatgtctgaaagctcatgtgagtatacaggataggaaacttcctctaccccatcacttacttgagaaagaaaatcatttaatagtgatacattgtaactttcaggaaagcctttgcgtgacattaaattcttttgctccagtactttgttgggataaataaagccatcagtcgtcaatgattgaacatctaaatcagagtaaaattgactaataagagtctctattactttagcagtcgttgactttcctgcagcaactgatccagtaattcccaggataaatggctggtttaaatcagcactcttaatgtaatttgtctttaatttagagaacattttcttattttgaacgcaaatcaatatatattgaactaataggatatatacttcttgaagttcattgactgtaacctgtaacttattttgatcaataaaactttttaatagttcataagaaggaagctcaatcttagagtttaatttagtccagtgattacggtcaacagtaataaaattattcatcatttacgctcttttaagtaccaaattaagaggtgtaacaattatagggacaagaattgcattaaatatcgcttctaccaagccgttgaaacctagagcagtgactagaattaccaacaatggagttgactgacaaaaatgccctaagtaacttgttaaggtgcttgaattagacataaacattaaatcggtaagtaaaattacaagaatagtgttcgtcagcgaagcaactgctccactgagcatataccctatcttttgaatatgtgcatccctatctttaaacttctgactaattaatccaggaaagaatcctgctagaacactaggaacaagagagattactggattttggaacaaaagcaagctgaccatatcccctggttgtgtataggccacaactaaacgagtaattccccaaactaatccaaaacccaatccccatttcggtcccattaaagtcccataaacagcaatggttaatggaatagtagtaattgcaggaagactaggaagaattcttacatacccaacattcggaacaaatgtctggataaaaagcaatgcaataaatacagctgtgatcgttaaattggtaatttcttttctagtcttcataatgatacgctccttgccatatgttgatttttcattcttattagagcacgatttacacaagcaggaacagcatctgaaatatcgcctccaaatagcataatttctcttacaatactagaagatatgtatgaacattcagggtttgaaaatagaatcaaagtttctatattggggtccattttcttagtcattaatgctatttgttgttcataaacaaagtcctcattatttctcacatcacgaacaataacatcagcatttaattcatgaaccaaattaacagttaaatcactttgaacaaggctcacggaaacattaggataaacagacacagcgtctttaacaaattgatatctttgttgaggagaaaacataccatttttggaggtattatttgaaacaacaacgactaacttatcaaataattttgaagcacgactaatgatatctaagtgaccattagttattggatcaaagctacctggaaatatagctttcataatgattcttccttaatttttaatcaattgatatctttttatatttagaaaagtatttcaaaaaccaatttttagcgtattctactgttggatcttcagtggaattcatagtatgacaaatcgatatcttccaaggaaattcaggtgtaatttcagcattctttattgcatgatcactataattctttcctattggagcagccacaataccaattaaattcttatcacgttgaactaaatttaaaatcaaatcccatgattgtgtttgaagaaaataattaggtttcagcctatcacctttaaatcttttgttcaattgaaaggtaaccataaaatcatctgtcagagtaacaatcttttctttttctatttcagagaatggaatcggaccagtaaaatcattaaaacgatgttctttattaaaccaaaccctaactgtattttcgtatattaaatcctcataaataccttcaacagtcgctggagaaacaatcacagctagatcaatatcacctaaaatcaacatcctttgtaattcataagctccacgctcgataatttttagttgaatgcctggattttggttaataaaggctattaacgcatcattgaacacggtcgatataataactggtgcaatacctaatctaacagttccgttactattttctgataattcatttagtttcgaaaccatttcaatatattgttcatacacttttttagattccttaactaaagttataccgtaacgtgtcaatccaacgattttaccctttcgccgattaaagatttttacttgttgcttaaattccatatctttaatcgctttactaatagcgggttgagaaatatggaggacttcagcactacgagttaagttaaagtcattatctgctattgtgagcaaataacggatttggttaatatccaactttgcatccccctatgaattaaaacacttaactatttcttatcgtttttgatattcatgactggctcttgaaaaattctcggatccatctcctgcaaattgtcactaataattggcttaaattccatttgatcaagaatatctttttgtaaatcaatgcctggcgcaatttccagtaattcaataccgcctttaactagcttaaatacggctctttcagttacataccaaacttcttgattactgtcatatgcgactttacctgagaaggtaatttgttgaacatgctttacaaatttctttactttaccttcttggataatgtttaacttaccgtccttgatttcttccttaagtccagctgcagtgaacgtaccagtgaagacaatcttaggtgtatattgagtaatatcaacgaaaccaccagtaccggcaatcttaggaccaaattttgaaacatttaagttaccatattggtcagcttcagctaaacctaagtaagttgcgtcaagtccaccaccgttgtagaaatcgaacatgtaaggttcatcaatagtagcttgaggagcaatagctgtaccaaaactaccaccacctaatgaagtgccaccgaatgtacctgcttcaacagtagttacgatattgtcagataatccttcctctttcataaccattgcgcaatacattggatattgaccaataccgaagtttacacaatggtcggtatcaggattgaataagaatgcagctcttctagcaataaccttctttttatcaagaggtaagtccatttgcttaacgtcttttacaatattagacttaataatatctggattgtaaatgtaatcggtagtctgtttagtcatttcaggattatcagtcggaactacataatcaactaaaacgccaggaactctgacggcctttggatcaagactaccagccttaacaacacgcttaacttgaacaattaccttaccaccattgttgtgagctgccatagcaacagcagtaacatccatggttaaaggctcatcatcaaatgtgatattgccgttttcatcagcataagtaccacggaaaattgatacatctggctttggtgtttcataagctaattaatcttttccatgaatcttaattctatttaccaaagtagaattctttgcagcttcatttaaacgaccaccatcattttctgggtcaacgaaagttcctaatccagtatgagttactagaactggacggtgagcagctgcatctctaaacaattgtgaaattgtaccttgtgggaaattaaaggcttcaaaatcattatccgcaaccattggtgcaagctttggcgctaatgacccaagcccaccaactactcgacggagcattcctttttcagcaaagttttcaacggctgagcctttgttatcaccgataccacatccataccaaacatccaaatcctttggatgtccagtttcttggtatctatttttcatcatttcaagaatttcttcagcgacatcagtgccaaggcagccatcaagagctacactagcgttatctgggaccaattctgctgcagttttactgtcaataactttaacagacatagatttatcctcctatgtttaaatctaactaactacgtttctactgaattggaaaccagatgagtttaataatatgtatgagagtatgtttcaaattagtagaattttggaatcatttaattccttgacacttataaggtaccgcttacatctagcattgtgaaatcattaatttttagcattatcataactattggttataacttataataataataaaaaaggcgaaattacattcgcctttatttaatgcttgattataaatattttatgtattaattccacagccataaaatggctttaaattacatgatttcgatgtttttattcaatactttttgagcatcatccattaaatctttaacaatttctgcagcaggcttagattctttaattagaccagcaacttcaccagccataaagaaactcttatcagggtcatcttctcttacaccaacgtatagtcccttgttcaatgctgaattaaattcatctcttgatacgcctgtcttttcaagttcaaacaacttgccagcttcctcattagcaataccacgagtagcaccacccttgatagtagagccaacaacagcagtaccagtatcagtagcatcgatgacagctttacgccagttatcacctactgggctttctttagcaattgaaaagattgtaccacattgtacaccttcagcaccagcaacaaatgcttcaacaacaccacgaccgtcaccgataccgccagcagcgattaatggaatattaattgcgtcagcaatttgtggccataataccattgaagtagtcccaccaatgtgaccgccggcttccataccttcaacgataactgcatcagcacccatttcttccattttcttggcaatcttaacattaggaataaccggcattaccttaattccagcagcttttaaatcagacatatatggttttggtgtgccggcaccagtagtaacaatcgaaactgtcaaatcttttgtgtaaatagttctttctcgtaaattgattttttaatcatttattcaaaataagattctaaggtatcctgaacctgaccaaagcctttatgaattcggttgaaatagcggtcattgtagctcattgcctggatgccaataaatgcatcaagcgactgttcagttggaaattctgccttaggcttagctttacgcttgatgacgttgttaaaggattcaatcatattggttgaataaattgaagctctgatttgtttgggataattgtagaagaccagcagatcgggctcaatttccctcaaacctttgataacatggctataagctttattccattttgcataaaattcatgcaagacagctgcagcttctttttggcttgtctgttgatgtatctgcttgaattcgttcatgatcttttcgcggtcatccacccggactttagcacagatattgcgcatgacatgaaccaagcagcgttgaaaatgagctttaggataagtcctggccaaggctgttttcatgccaacaacaccatcagaaagaaagagttcaacttgcttcaagcctctggacttcatgttttgaagcatctctgtccagacttcaatgttctcactaggagcaatgcagtaatcaatgacttccttatgtccattaggtttaatgccaatggcaatatatactgcttcacgctcaaacgtttctcggcgcaaaggaaggtatgtcgcatccaaatagacacagaaaaacttgtcgcttagcttgcgcttgtgataagcctcaaccttggggagcatctgcttggaaatatttgatacttgagctggactataatgactgccatacattttctcaatcaagtcagcgatttctctggtagttacgcctttggagtagagcttgataatcgtgctttccaaaacatcagagtgctgcttgtagtcaggcagcgtgtgctgatgaaactgaccgttgcggtctcgaggcacttgcacttcaattggtccaaactgggtatcaaccttgcggaaataagcaccatttctagaattgccagtattccagccatttctggcatagggatcatagcccagaaaggcagtcaattcagcttctagcaagttattaacagcctgttgtagctctttgcgcaataaatcgtttattttgtcttgattgaatagagcttgtgctatatttttggtaaaatcattcatgaaggagttcttctttctgtatgtgtttttttgttcaaaccaatcatacgagaaaggaactcctttttctaatgttttaagaaataaatttaaggaattattcatccttacacaaactattttacagtctcaaattctttacaatttcctgttagaaaatcattattcaagtagataaagaagacattaactataagaaaaggcgtaggttcatatcacaacctatgcctttttcacactataataatatttttactttacgctatacttttctttcccattaacaaaagtctttagaacattaagattactatctagcacattaaaatcagcatccctatctggcaggatacaaccacagttttcatttagactacgtgcaggagtatatgttgccatcttaattgcctcatatggcttacatacttcccaatttactaagtttcttactgctttatccaaagtcaatgtgctgccagctaatttaccattttctaacaatgcaatgtgattcctaactgttactttcataccactaagcacatattcaccatcaggcatcccaccagtacgtaagcaatcagtcattaatacaatatgattaggtccctttaaatcaaacaacatctgcaaaatgatcggctttatatggtgaccatcagctatcatttcatcaaatacatcgtcagctgttaatgcacagccaataatattaggtgtatgctgagataataagttcataccattaaacgtatgattaaacattgtagctcctgcgtcaagggcttttcgtgcttcttcatatgttgcactagtatgtcctaaagaagcaactacgccttttttaacgatatgtctgacaaattgtgggacattttttcgttctggtgctagtgatatctttctcagcatcccatcagaatctctgtaccacttatcaaattcttcaattgaaggatcctccataaactcaggattttctgcaccgccatgttctttagtgaagtatgagccttcaaagtgaatacctaatatctttgcgcctttttcctgccctttatgtgcagcaaacgttttacaaatttcatctaatttctcagatgaagtagttactgtggtcggcatccaacttgttacaccatattgaagaagtttttcagaaattcttgaaatctaaaattgcagcactttttggtttttcatcttcagaataataaaatccaaattgtccattatcttgaatttctaagtatcctcgttcttcaacaccatgatctaaataaaacttctttgcatgaataaaatatgacattttatacctcgctttttctataaaaattcgactttataaccaaaaataaacaagctacgtctgccttttacaaacgtagcttgttttgggagaggggaaatttataactaatcagaagatcatttattcaaaaacactcgtaaatgtcttagcaatttgcaatggtcttgtaattgcaccaccaataacaattccggctggtccaatatcaatcattttctttaattgttctggactgtggatttttccttcagcaataactggcattccagcatcaaccaaagctttaactaaatcataatctggatgatctgaaacaggactttcttcagtgtagcctgacaaagtggtaccaacaaagtcaacaccagcatcataagcattctttgcttcttcaaagttagaagtatcagccattaataaacggtcaggatatttagtcttaatttcatcaataaattctgcaacagttttaccatcatgacgtgggcgcaatgtacaatcaagtgcaattacttcgacatctgttttagctaattcatctacttccttaatagtagcggtaataaatggcttctcaggtggatattctttcttaataataccaatcattggcaggtcaggaactacttccttaatttgcttaatatctctaatggagttagctctcaaaccaactgcacccgcttctttagcggctttagccatcagaggcattatgccaccctcttcggtgtaaagtggctcgccaggtaaagcctgacaagaaataattaatccattatgaactttttgaataaactcttcttttttcatttttatctcctaaaaatttaccttattctaaagcattactactagtgtccggtggattttctgggaacttagtatcaaatagccagttaaatgcggcactatcaacataataaaacattgcttcatgaccatattctggtaacagcatgtgttttttagggctttctatcctattgaaaattgcaaactgcgttgctggaaaacaagtatcatcttcaagtcctgtaaacattaaaactggacactttattctatgagcaaagtttttaacatcgatataagacagagtacgcatcaacttgtcttccgtcttatgaaatggatcataaaacttaaaatacctaaataactcatcatatggcaatcctcgatcacccatttctagtacatgcttgaaatcagaaagaaacgggtattgagtagcacattttaatacgtggatttaatgccgcagcaatcaaagataaagcaccaccttgagatccaccccaagaatatagatgttccttgtctacacgtgacatatccgcgactgtttcaattaacgtgtatacatctagatatacatttttataaaacagatgatctggtccatccactgctccacgaattatgtggcctaaaacggtatttccagcataagtaccgttatcaaccgactgcccttgttggcctctaacatccattgcaacaacgcctacacctatcgcagcatattgcatgaaatcaacccaatcgagagcttgtcccatgtaaccatggaaatagaaaactactggaatatttttttcatgtgctggaaaaatgcatttagcatgaactattccgttatcagtacctttgaagaacaaatcataaaaaacaacgtttttaatattatcgccaaaatttcttttaattaatttaaatggctttgcttctatctttttgatttctttgctccaaaaactatcaaaatcatctggaacttctaatctacctcgatatgactccatatcttttaaggacattgaatctttcattatagtttcacctttttcaactaatccttaaccttctcattgatagttttagcagttaaacctgtgatatcatgtgcatattttggagtaaccaaaccaattaaccaagcaattacgaatgaactaatgaaggctacaattggttgtaccaatgttgcaacacccattacttgacaccaataagtaagagcagcactaattaatacgccccagacagcactaacacggttggctgacttagtaaagataccagcagcaaaaataccagcaactggaacaccaaacaaaccagtaattgaaaggaagatattccaagtttgagatgcattacccatcaacaagtaaatagcaattcctaaactaaatacaccggcgatgacaataatgatacgagctagtgtaacatcattcatcttccatttcttatcaaaatatctttgcttgaagtcagttacgaaacatgaagaaatagcattcaaacttgaagcaatagttgactgagcagcagcgaagatacctgcaataattaaaccggctaaacctgctggaatcttggtaattacaaagtatggaacaatagcactagtgttaaaaccttttggtaaacttcccatcgtgtggtaataacaatacaagaaagtacccataccaaagaatacaaaaatagttacaattgctaaccaaccgtttgtccaaagtgacttggcagttgctttaatacttggagtagtctgataacgctgaacaacatcttgactagcggtatattgatacatactattgaagaattgaccagcaaagattactggaatgaacatagctaaattgttaggattccaatctttagcagataagaatttagaattatctacagcaacttgtgcgatcttcccaggtccaccagtatatacgactgctaaaatacaaattaataaagcaccaccaaggagaaggaaaccttgaataacatctgtccaaataacaccttcaataccgccgaggaatgcataaataatacacattgcaccaactaaaacagcaatcaatattggattaatatttgaaacggaagtaatagccaaaattggtaagtaaataacaatggctactctaccaatgtgataaagcataaatagcaaacttccgagtgaccgcatcactggtccaaaacgcttttccagatattcataagcagtagtaacctgtaattttctgaagaaaggtacataccatttaattaatataggaataattaaataaattgttaacgtcccaatcgaataaccccagtcagttaaaaaagcttgttctggtgttgacatgaacgtgatcgcacttaaagtagtagcccaaatactaaatcctgcagcccaagcaggcaccttaccttcagctttgaagaaagaatctgtacttttacttgcccgtttagtaaagtaagcaccaacgcctaacatcgctagcaaatatgcgattaagacgatcctgttccacataccgaatcctgttttcgacataatttttctccccttttatttaattcatttttacttcttttctttgtgttcgcattatgaaaagtttcaatataataggcgcaatcaatgttgtgattactgtgacaacaatcattgcagtatagtgattttgatctattaattgtgattgaagagctacattagcaacaactagtgccatctctcctcttgaaaccatacctgcaccaacaatatttgcttctgtccaattaagatggaacatctttgctccgataccacaaccaatttgtttacccaagatggctataattattagtaaggcaataaacaataagtccttacccatgccattaaaactaatctgtaagccaatacttacaaagaacacaggaatgaaaactgcataaccaattggctcaatttttgttgataatctgtctgcataattagtttctgaaattgctaaaccagcaaaatatgcgcctaaaacatcgctcattcccattgcaactgctaaggcagctgcaccaaaacaaagaatcatcgcaccagctgtatcactttcagaagcattaagatcactaaaaatatctaagaattttggcacaacatacttaccaataagcaaaacaatgataaagaataataccatcggaatgatcattttaatgattgatgtatggtgaccaccaccgtagatactggagcaaattcctaataaaatgacacagataatatcatcagcaacagcagcaccacagataattgcaccttcacgagtatttaaacgattcatttcttttagaacttgaaccgtaatacttacagatgttgcgcttaaaactaagcccataaatatagatgcttttactgaaaatccaaaagccgtatggcacagaagatatgctgtaccagttggaaaaattactcctaaagtagctacagttaaagctggagcccaatatttaattaataatttcaaatctccttctaggccagcaatgaacatcaaaacgattacacctagttgagaaaaataattaatgaatgtggtgggctgaatccaatttaaaatagctggtccaactaaaatcccgactaataattctccaattacacttggcatttttgccttaactgaaaagtgtgccgcaattttagttaatagcagaatcaaaaatagttgtacaaggtacgtcatcaaagtcacctaccgcatgtctataacagcattgaccttgtcaagttcttgttcaatcttgttatcatcaatgccatattctaggaagattggaatttgaggatcaagtcctaaaatcattggttcccaatctgtagttccttcacctaacatcacagtttttttattcttaatatcctttagatgatagttagtaaccttatcttttaattctttaaaggcaacttcaggcttttcaccaacccagtaccaattacctgcatcataagtgaagccaatattaggatattgatttactgcttcaagacctttaagaacagtacttaaatagcctgtttcattagaaagattttccaatgtcaaatcaacgttagcatcttcaagaagcttcgcagcatcctcaatttccttttggtcaacatctttaacgtcacctacgaaatacttcaaatgcttcaattgatgcttttttgccatttcaacattgtctttcaaactgttattgacatgtccatcaatgaaaaattgttcaggaactgaataatacaatccccaactgttctttttacacaatgctttgattgcttcgagttcgtcgtctttggtgttttctttaaagaattctccacgaacttggatattgtcaattttatctttcaaatttgaaacatcctctaagcaatcaatttgactctctccgctattcaaacgatcaacaaagattgccgcattcactgaaactttcatgacttgcctcttttcttcaataaacgggattaaaaaaaccgtacaattatgctcagcatttgcctcacataagtacggttgaattttgctattagttaatacacctctagcatacacgaaaacaattttattgcaagcgctttctagaaattaattttcaaaaatgctagaaatacctccataaagttgtgcatcattacctaaagaagccatctttaatacggttttacatagatttggcggtaaaatctgattcaatttttcgtccaacaaatcttttaaataatctccctgcttggaaacagcaccaccaataactaatacttctggatcaagaagtaataatacactgcttaagccctctgcaacttgcaaggcccaagcatcaataattttcttttctctaaggcttccttttttggcacgtgcaaaggcttcaataggatcaatacctaagggttctaattctttttgtaatgcaatggttgatgaccgctgttcatagttagttgatgttattggatcaaataatgtatatcctattgaattacccgtttgatgatatccattaaataaatgtccatctgcccaaaatgcaccaccaattcctgttcctaatgcaacacaatagatagtactagcatttttaacacttccagctaatttttcccctaataaagccgcactaacatcattaacgacactgacaggaattttaaatgtccgctctagctctttcttaatgggagtaccttgatagtcagaaatagttggtccagcatacattatgcttccatcgtctccaacaataccggcggtactcacaccaatcccatctaattgatacttctgtatcatctctttggtaactttaataagtgacttcaaaatatgtccgtccttattatgtaatgtatcaactttgcctctatctgaaatctgaagattctcatctacaataccgtatttaatcgtggttccgccaacatcaaaagctaaatatttcttactcatttggttcacgccttcctgtataatcaagttcttatattaagcgctttcatagtatcatttaaaaacaattttctcaaataaaaatttagaaaataattttcgtgctctgtatctcttgatacacctacgctttgttcaatttctgaaaattattttcgcaatttagagttgcgtaaagcgttttcatgttctatactgcaggtgttggttgaatttgccattagttatacagtaattaaaaaaatattattttattttgactaaacggaggtcaaacaaatgcaaaaagtttatgcagccttaatggtttcatttgatgaagatggtaatattgatgaaaaaggtactcgtgaaatcattcgtcacgatatcgatgttgaaggtgttgacgggttatacgttggcggttcaactggtgaaaactttatgcttggcttagaagaaaagaagaagatcttcgaaattgcttgggacgaagttgaccaacaagttgacttgatcgctcaagtgggtggcccaaacttaaaagaagctaaagaattagctaagttcgttactgaattgggttacaagacaatttctgcagttactcctttctactataactttaccttcgacgaaattaagcattactacgatgaaatcgttaaggatgtagatgcaaagttattgatttactcaatttctgcattaacaggtgtttcactttcattggataactttgctaaattattctcaaatccaaagattatcggtgttaagtacactaatgcagacttctacttacttgaaagacttcgtgagcgcttccctgataagcttattctttcaggattcgatgaaatgttgttacctgctttaattgaaggtgtcgatggctgtatcggatcaacctacaacgttaatgcaagaatggttaaagaagaaattgctgcttacaacaacggagacattgctaaggcacaagaattagaacacaagaagaacgacattatcactgcccttcttaataacggtatttacccatcaattaagttagtattgcaaaagatgggcgtacatgctggctacaaccgtgaaccaatggctaaatacactgataaagttattgaaggcgctgacgaaatctacgctaaatattttaataagtaattgcttatttgccaaaaaactacaaatttagcataattaagcggagaaagattacaaaatctttctctgtttttttgatttaacacattaagaaggttttcaatatgacgtttttaactgatttacaaaataggctacccgatttacctcagcaagaaagaaaaattgctttatttatattacaggacccacagtttattcaatcagcaaatataaatcaattagcgtcaacaataaaagttagtaatgctactattactagatttgcacgtagagttaactgctctagttttacagatttaaaagtcaaattggctgctgctgcagcttcttcacaagtaaatactattactaatcaagataactctaaaacgaccgctcaccaagtatatgatttttacaatcgagttctatctgaaacacaaaataaacttgatataaaacaattaaaaaagataatccaactcatcaaatctgcaaagagagtttatttttatggtatcggttcttctggatataccagcttagaagctactcaaagattactaagaatgggtatatctgcgtttgcggaaacagaaagtaataatatgtttatgactagcagtatcatttcaaaagatgacctgattatagctatttcttcaacaggtagcacagattccttggtaagagccattgaactagcaaaaaagaataaagctacagttgtagcattaactagctatgacaatagcccattagctcagcttgctgatattgtagttggtgttcaagatacaaattatattaacgacgctcggtttattaactcacagttttcaataatgtatgtaatagacgtaattactacgctacttttaaagaataataaatatcacgatagaatgactcgaactattacttctgtcttaaatgaaaaatacgatgcatacaacaaatagcctgatatgattatcgtttgttatatctgatttaactatatttcatagatagtattaaccaattaaccttatatacctgatataataattatggtgaagagattaattggataattcataatacttcgcactctagaaaacgtcttctgttattgaaggcgtttttgttttgttcaagtgttttacctgaaatctaactggatatttttaggtattagcacaaaacagaaaaaaagccattgaaaacttgttttttatacaagtaatcaacggctatttttctatccaattctaacgttcttaaaatcgtatggaacgcctgtagggttaaaggaaacgccctttacggtagtctttaataattgtggcttagcaacttgaactaatggaatagttccttggtctttcatcaataccttctcggcttctactaatcttgcccagcgttttactggttgattgccatatacgttttctgattcattcaacagcttgttaaattgattgttattccaaccattgttcaaataacttgatcctttttggaaaacgtccaagaagttgattgggtcgccaaagacagcctgccagtttttaattgtagcttggtaattaccagctgtttgacgtgaaatcaattgagtatatggaattgtttgaacagaaatttgaacacctggaagttgatctagcttactttgaagaaattcagctgtttgctttgaagtatcgtcatcagaaactaacaaggtaattttaattgagttagtcttagattctttatacccttcgcgaagtaattgcttagccttagcaagattatacgatactgcactcttaacgtaagcatcatcttcaaatggtgttcctgtcttaggattattgcccatacctgatggaacgaagcctttagctgggattgaaccgtcttttaagacattatttgctaattgtttgcgattaattgctaaagaaaatgcctgacgtaccttaagattcttgaatgctggaaccttattttcgttaagttccaatcttttaatcgctgaagacaaacgtgcatggtagcctgctttattcttatttgcggcaacttgctcaccagtaagtccagtctcatctgccttacctgcttcaaaaagattatagctagtcgtagttgattcgctaacctgttcattaactttatttaatttaacatttttagcatcccagtaattcttattcttaattaaagtccaagtcttgttgttaccattccatctagtaagcgtgaatgggcctgaagaaactgtgtatttagcttgcgtgccgtataacttgccatatttttgcaccactttttgattttgcgggaaaaataatggccacgacaataaaatcttgaagtaaggcagtggtctagttaattgaattctcaaatgatatttagaaggagcagaaacacccaaggtatccggagacttttggcccttactaattgcttgcgcatttttgatctggtaaagatagaatgccatctgagacttagttactggattaacagtacgcttataagaatatacaaaatccttagcagttaatggatcgccgttagaccattttgcggtttttctaagataaaaatcataagtcttcccgccattagaagttttagccttagtagctagagataattgcggtttattgtttttatcaaggcggtatagtccgtccccggtattaagaagagcttgaaaactggtagtatcagttgccaaagaaggatcctgcgtagaaagctgtgtgatctctgaccaatttaaaacctgcttttttgaaacggtattactatctgattgcttaccacaagcagctaaggttgccgtagttaaagctattaatccgaatgaaacaacttttttatttattctcataaaaatctcctttgctaaaaacggtaaaaagaaaaacgccttactagatcaacttgatctaatagggcgttcagtaacgcggtaccacctatctttatggaaaaccaccttgaattgcgtacggccgtctggcgatacgttaccgctataacgggcggacccagaagctactaaaaacttcatagcttcaagctcaaaggccattttcaaaagtaggtcgatcattatctttcaccaagtgataactctctgtagaaggaccgccaatttactttccttatcatcgctaaataattaataattatgttgattaagataatagtctaaatcattttaaaagtcaaatataattttaatgcttttcattattttactaactattcttcagttagtcttattgactcatttcccaaccttcgcgcatatctttaactaatactgaagcatctaaatcaaggtctacctgttcatattctttttttaattctggatgtctctcaatatctttcttgatgaactcttgaatcttactcatcttatttcaccccatattggccttcatatgataaaagaccgttgatgtcaataactttaccgtagagagtatcatcttctaatgaatactccactgaaccataataacctttatatgataattcttttttcattagattttacctcataagttaatttcgtaaatactaaatcataaatctacagtttcatgatccagtgtttttcattttgtccaaatctacttaagttcaaactccaacctaaccggattatggtctgcatactcaaaatgagtattaatgttatacgcctttgcttgcacgtttttcgacacaataaagccatcacaaatggtcatataattaactttaggatcatatttcatgtctgtagcacgaacagtcgcaacattttcgcgattttgcgccttaatcatagtgaaatctttaggcagcattttttgatcaagaacggatacccaactaggaatttcttcttggtgctcaaaatgagtcatcatgtctttccctaacgcatgattaaagtcgccgccgacaatgacatagttacctcgtcgatattctttttccatcacagaagaaatcagtttcatctgtgccttacgcattttaccgcccttatcataagcagacatatgtgagttaatcattaccaaatcttttccattagttactggaaagcgcataactacaaagcaacgatctaaatcgacaaatttttcaataggcccactagaaacaggatattttcttcttatggcactatccatcttatatttgctcatactcaacaaccctgaacgtacagtgccatgaggattgttcaatggaaccgctaaaaaagcagagtggaaattactagcaaaagttgaatccatttttggaaaatcatcttcaacctttttcacctgattaacgtgaaagctacgagttgaatcagtatcaatttcctggaaaaacatgcagtcagggttctgctttttcattgtttgaatgacaccattagtggaatcaagaactgcttgtttagatattgctgtccctcgatgcccctgcggtttcttgccatccttcaactgacctgaatccataaagaagtcgaaatcatgattataagcaccaaagccaacattataagtcgttgtcttatagctacgcccccgcttttaataactgagactgattgttattaattttcaatctttgattatcaggaattcgataataatgtagagacaaatatatataatagccacagaagataattacacatgccagtatcactgacaacaacgctaatcccactttttttaagactttcatatttactcttttctaactgaatcatttttagctttacttaagatattatagtggtgtaattattaaaaaagaacccacttatagtgagttcttcttattagtcatgaaaatcaattgtagtcatagtaaaatttttaagccgaaaataattaggtacttgttttctcctcttcggcacacttccaaattagactttcgtttctcttaagaatatctagattatttctagtttcagaaggtgtaaagtcgtagttgtaaatttctttataatcaggcaactcatatctggcttctttaaatccataatctgtcggttgttcaaagtggaccaaaagctttttaccaccctttacattatcgtctaccattatttgagaatatgtaattgacaattccccaggaaattctgcatatggatacaacatgtggtcttcctatacaattttataatctgcagtatagttaataggctaattcagatcgacaaatcaaaaatttattaataatatctactggggtgtttttcttaaaagttaaagcgacttctgtatgctcattattagcccactcttctttttctatccaagggacaatatgatcattaaaatatagtgtttctttattcggcattttcaaatcatttagcacttgcattttctagcatccccctaataattgtattcaattctttatcacacgtatttcctatcacagaaaactcagctactacctcatttattttatgttctttaaagtaactatcttctgcatacgaactgattactttcctaagataaccaggatactgtagccttatataatgctcaagtttagaatcaaaaaacatctttgcttctttaatatatatcattatacttacttttatgtactttataaaagcttttaactgcatcccaatgtaatttatatccatattcatgccacaaaattcctctcatatctttagcaacgaaataacttgactttaaatgcgatttaacaatttgatgagtatagatacctttattaacataaataacatctttttcgcgatcgtaagcagctactaccttcaaatattttgaactaactattactaaatcaggaaacatgtatttattgtcatcttgtagtgaatccattattaacttagtagcctttctacttttcttatcatcattttctctccaaactttcaaattattgttgttaatagccaaatgagtatgaacacgacacacttgattttcaatatttttaaaacggtattccttcttttgagctaaaaaatccatataattcctttccttattactcaatagtcagttcattagtctgcccaaacacttttacaattatatcaaacatatgttttgaaaggaagtgccataattttagaaatttattttcacaacaaaaaaggcgatatcacaaagatatcgcctaattctatattttattcacttttaatactgtagatcgctaaattgcttgttggagttttgcttagccaaggcttcgctcttccagtagacagcattagttgttcccttagagttagctgaaacaattacactttgaccattttcagtatgcggtgccaaatatgtactgccttgacctggttcttgacccatattagtaaaactatagaaattaattccattaatagtagcttgtttcatatagcctgaactagttgatgaacctgaatttttagcctttacatccatgctaaaaccagcttcatcattgatcttattagcagttacagtcaaagtatcgatattgccattgccagtatctgcagtgtaccaagtaccttgcaagcttgatggaattacggcactagcagattccttagcaccagctgcattgtcattatcgccttcaagtttaacatttagtttggcatttttagccaagctttgaactagatcaacatcattatttttattaatgtaatcaactacatcttgtaaagttacagtaccaaggtttctttgcttaacaaaaatagtaattttcttttgtgctccatctccgtttagcatgtaacgagcattactgcttttaccggtaccggagacctcataaacatatcctgagtcatcagaagtaatacctgttgcggctttggttctgaacgcaacacctaaattaccatttttggcagcattaactgcaatttcccaagtgtcgccatacttttgtgcagcatagacagagattgcactagcctgcgtcttatagtccatattctcagcagataattttgctgagttttgactgttacttgattctgaggtgccagttttttctgagttactcttagaaacttgacttgatttttctgactgtgattgtgaattactattaccttgtgtactttggctacatcctgctaaagttaaagcagctgaaattgcaaccaaaacagttaatttacttttcaaaaggaatccccttttctttcaataattctatctctttgcttaatagtattataaaaaatacgatccgccaacttcttacatgattattttacaaaaattatacttcttgttcattgcaattattttaatacttctttacaaatattaatttaaagtcttaaattctgcatttcggtgttccttggctatcttggtgctcttccaataagtagccgtataatgacctgtatcaacgctataagttactactgccgtattgccattatctttttggacagaataaagtaagccaaaatcttgagcattcaatgtttgaacatgatagcaatttaatccattaatattttcgatccgagctctagcccactttttcgtttgatctaaggattctgctgctacaccagaattagaaatatgatgaatttcttcaccattaacagtatgatcagtaattactaacttctttcctttatagttgtaccaagtaccccaaagtctcgttggaactaatgctaggccatcgtcacccttaaccccatatttgtcagatgtaacttcagcagccaaagtagtcttagttgctaatttttctacagattttacttgattatgttcacttaaatatgaagctatttcagataaacttgctacacctaaatttttcttctgattataaaaatatacggtttcacttttcattgtataaaaagcattattttcttgaccattgccagttacttcataaatgtaacctctacctttttttatccaattaaaaccagttcgattttttacactaatgctcaaatgatttttcttggcatcactatatgcagtcttccatgcatccccatatttcatcgatccataaattgagattgcactagatttttcagtatctgacatactcttaacaattaatcttttgggagtctgtttctgagtcacaccagatttttcaatagtttggcgattattagtctgcttttgcgattggcaagcagttaaattgatcattgcagctatcaaacaaaatgctactaatgtcttatttctcattccatcgactccaatacattctcattaacacaaaagtatccctaaactaattagggataccagtccagtcattattacaattatatagcagtttgctcttctttgaagagaatattttttgatttttggtaaaagtttatcccccggatttaaaattgaagtgcaacactaagtgttaaacaaaaaggccatgaagacctaaacttgaagtgacgaaaaatcaagaaaggaagatctttatgaccaattcaaattctagcatttctaagcactatcatcaattaaccagcgtacaacgtggacaaattcaagcaatgctggattccggcataacttcccgtactgttatcgctcaagaagttggctgccataagtcgacaatcagtcgcgaaatcaaacgcggaagcgtcctgcaaagagacagcagctatttattgtatgagcactattacgctgatactgcacagatttattatgagaagcgtcgcaaaaactgctatcagcgcaatccattgaagcattatgctgtctttttgagaatgctctccagacgctttaaagctaaatttgatgccaccagcatcgatgagttcgttggtgaattcaaaaggactatgccaggctacccttgtcccagcacaccaactgtctatcgctatattgatcagggcttgctggacataagcaatattgatctgcctatgaagctcaaaagacgcaggaacaagcgtcatcacagccatggcggtcacgctttgcacaagaagcatcttggcaattccattgaacagcgtcctaaagagattgaagacagaaaagctccgctgcactgggaaggagatctggttaaaggcgtcagacgcaagaatcagcctgctttaatgactttgactgaaagaaccacacgctttgaagtagttatcaagattcctgactatcgggcaagcacatgccaaaggctgcttcaaaaggagattgacagacatcctgcctggtttaaatcaatcacgtttgacaatggctctgagtttgcggatatgaccaagatcaagggctgccagatttactttgctcacccatattctccatgggaaaggggcaccaatgaaaactgcaatggtcttttgcgtcaattcttccctaagggcaagagcatgaaagacaagtcaaaagcttatgttcaacaggcaactgatgccattaaccacaaatatcgccgaatcctccaatatcacacagcagaagaactcttcaagcaatatatttcctcatagcctaactgttgcacttaatttgacaattcaggtaaaagtttatcctactagatttaaaaacttatccataagttcacttatctaatcgtaattagactaattacgattagatatgcttttgaaaaatctatactttacaaaaaaatctcgtggcctcaatcaccacgagattttccaattacttatttatttttaccagttcatgtaacgttgacgttcccaatctgaaactgattgtgagtacttagaccattctaattcctttgattcaatgaagctgtgcattaagtgatcacctaatgagctcttaattaaatcatctttcttgaaggccttaattgcgttgtgaagagtagttggtaatggcttaataccatgttctgctctttcttcttcagtcatttcaaagatgttttcttcaactggcttcattggcatcttttgttctttaataccattcaaaccagcagttaaacatgcagcaagtaacaagtatgggttagcagtcggatcagctgaacgcatttccaaacgagtattgatttcaccagcacttggaatacgtacaagtggtgaacggttcttagcagcccaagcaatgtaaacaggagcttcaaaacctggaattaaacgcttgtatgagttaacggttgggttaccaattgcagtaatggcacgagcatgttccaaaataccattcaagaagtaaagagcagtatttgaaaggtggaattcgccatccttgtcataaaagacgttcttgccattcttaaataatgacatgttgttgtgcatcccgttaccagcttgaccttgaacaggcttagccataaagcttgcaaacaaaccgtgctttctagcaattgcacgcgttaccatcttaaaggtttggcatctgtcagcagtagtcaaagcatcatcgaatctaaagtcgatttcttgttgaccatcacctacttcgtggtgagctgcttcaacttcaaagcccatgccctcaagagtttcaacgatttcacgacggcatcttgcaccttcatcgtctgaagtcatgtcaaagtatgaagcatgatctggaacttcagtagtccaattgccatcttcgtctaacttgaaaagatggaattccatttcaaaaccaatatcaaaagtgtcgaatccagcttcattcatttcaccaagaacacgcttcaagttatttcttggatcaccagcaaatggcttgccatcagtggtgtgaactgaacaaatcaagcgaccaatcttaccaccgtgttcgtcaccccatggcaatactgtccaagttgagaagtctggatataaaaccatgtcactttcttcaagacgaacaaagccatcaattgaagaaccatcaaagcgaatgtcattagtcaaaactttatctaattgactcttaggtacttcaacggccttttcagtaccgttaatatcagtgaaggccaagcgtaaaaatctaacgtccttgtcttcaacttcttgcttaatttcttctgcagtatattgtttactcatagttaattcacctataaaaacaaaaaatattaaattggtatggtcctatgatttattcttatctcctagaactgtttaatacaatagcagaccaatttaaaaaagtcaaattggtctagtgattatttttaaattttattttttgttaaaaaatgtatcacgaaccgcgttaataatagctactttgtcatgcgcataagtcaagccgccctgcatataaaccgcataaggtggtctaattggaccatccgctgaaaattcaatagttgaaccggaaacgaaattaccagcagccataataatcttatcttcatagccctccatatgcacagcttcaggcgttacaaaggaatcaatcggtgagtttttctgtacttcttgcacaaatttaaccatcttatcaggatcaccaaaaataattgtctcaataatatcgcttcgcttctcatcccaagctggggtaacattcaagcccattttggcaaacaaagcagccgcaaaaatcatccccttttcagccataccggtaacattaggagccaagaaaaagccttcataaaagtcatgcaaattgccaatagtggcgccctcatcggtgcagcctggagcagtcaatgcaagttttgcattttcaaccaggtcctttttaccaacaatataaccaccggtcttagctagaccaccaccagcattcttaatcagcgatcctgccattaagtcagcaccatactcagttggctcatgtttttccgaaaattcgccataacaattgtcaataaagacaatactcttagggctgacccgtttaacaaaggcaatcatgtccttaatctgatcaactgtaaaggtctttctggtggagtagccacgtgaacgttgaatggcaacgatcttaggctgatcacgtttaagaaccttttcagcctcgtcataatcaactaacccatcatcggttaacggcacatatgaaaaatgcacgccgcgctcgactaaagtaccacgcttatcatcagtcaagccaatcactttttgcaaagtatcgtaaggctgtccagttaaataagttagcgtatcgccgtatttcaagttacctgctagagctacaaacaaggtgtgagtacctgaaacaaattgaggccgaactaccgcatcttcagtttgaaaaacttgagcatagatcttatctagcttatctcttcccatatcatcgtcgccatagccattagccccatttaaatcggcttcagcgacatcattagcttggtaagccgccaaaactttagccgtattatagacaatttgatcttcaatctcaaccagtttaggtgcgatctgttgatcaacttctttaacaattttttgtaatttttctggcaaattattcatttttccattccttgactttcttcaatatcttttgttcgcaacccggatcatctaacggatcaaaccaaactactggtaatttatttctaaaataagtcaattgacgtttagcatagcggcgcgaagctgtctttaaatcttcaatgcgatgctctagcgtctcttgcccttcaaaataagggaaaaattccttatacgcaattgcttgcaagacctgatactctcgtgctcgattttgataaataaattttgcttcatcgagcatcccttgctccatcatcttatcaacacgcaaattaatcctgcgatatatctcttgacggtcagaattcaagccaataatcaagtaatcataacggggctcgatctgcttttgttgctctgaaaactttttgcctgtacgctcaatcacagtcaatgctcgcatagttctgcgactattggctactggtattttttctgccgccttaggatcttgctcattcaagacctgccacaatttttctgcgcctttttccttgaggtagttttcccacttttgcgaaacgctacgctcttctggagttttctcgcctagctgcatcttattcaataaagcattaacataaaaacctgtcccgcctgcaataattggtaacttacctttttggctaatctcttcaatcgcttttgttgcttgatccacaaaatctttaactgaatactcgtcaaaaacggattgcgtatcaactaagtagtgtttcacttgcgcttgttcttctgcagttgcctttgcagttcccactgccacttcttggtaaacctgcatggaatcgccagaaataatctcgccgttcaaccttttagctaaatcaatcgccaagtctgtcttaccaatagctgttggtcctacaatcgctagtacctttttcatccccatcacctttcttaattttgatacaaaaaaagagcgcattagagttaccccctccaaatgcgtcttcttttcatttaatattttgacttcttagttcgaccatcccaagcttcaaagccatctttaagccaatggatagaaacaaaaccctttttctttaaaaaacgggcagctctcaaagtaatggtctttgaatctgagtaaagataaactggcaagtcgcttctaagctcagtatattgatacttaagcatggtatatggcaagttgcgagcgccatcaatatgcttgcgtttaaacggttctttttcacgcagatcaataatttgtgccttacgcatgccttctttaaattcttcattagtcaattcgccaccaattgatttagcttgaattttattccaagcccagataccaaccatgactaaaataatgactaataaaactaaatctaagacaattaaaaaactcgacataaactaaatctgccctttcataaaaacttacatctattatgataccgctaaactaatttactggctatcatttttcggatctttaagcgcctttttttgttcatttttgacttcaattcgatgttctcgactcaaaatcatcttggcaatcaaataatcatgttggtcaatcagaccggcacgattgatattgtcgagctctaaagccattaattcaatatcccaaattcttttgccaacatgaaccaaaattccgtatttttctaataattgttgtacatcgtagagagttttcattagaaattaattatcattcctgttctaaccgtccaaacaacatatacgactaacactgcagcagccaatacgcgccacttaggattgtaggtcttcattacacgatcgcccaagataatcgctaataagaagccggcaattaagccaccaatatgaccccagatatcaattccaggcacaaaaatatcaagcgctaagttaatcaatgctaagacaaaggcttgtcgacctaaaaaagcaatcattggattatgcaaattgcgcaagccaatggcagtcatggctccaaacaaaccaaataaggctgttgaggcaccagcacttaagccgcgatcagcactgaaagccaagctcattagattgccgccgaccccagctaaaagataagttactaaaaagcgcacatgtcccattaatggctccatatactgccccatgtagtaaataataatggcattagaaaccaaatgcatgatgccaatatgcaaaaactgggccgtaaataggcgccaccattggtgtccagccaccacggcaaaattattcatggctcccattttcatcaagacattggtattctctgagccacctaaaaacacttcaactaaaaagattattaataaaactactaaaattcctaaagtcacaaatgattgtgagaggttaatttttcgttgagtattcatttaatcccccttatcttcgtcattgtgactattttaataaattttatcaggagtaacaattgtttgaaccggaatatcggttttttcgataggccaaatgctagtatcgaacgtcatcttgctattggctaaagcaacagttttaggatcatgcttagccaaaaagcgatcataataacctccaccaaagccaagtcgaacatgcgaatctaaggcaaaggctaaacctggcacaatgactaaatccaaatcattattgattttcgcatcttcatcggcgacttcttccacaccgaatttagattttaccaatttgctcatatacgtatagcgtaaaaagtctaaagtatgattttgatcgcctcgtgcctttgccagataaacttcttttcctttatcccacaaacgagcaattaattcagaagtatctacttctagtggtaaagaagcagttaccccaatcgtctgacttcttctaattagatctgtagacattaatttctctaataaaatcgcatcttctgctcttttttctttagtattggcaaattcttttaatttactgatttgttcttttcttaattctgatttttccatctttttgtccaaaaaacaaaaaatagcaggcacgtaacctgctatcttggtttattacttagtttcacggtgaagtgttgcgcgtctttcaactgggcaatacttctttaaggataaacgttccggatgcttacgcttgttcttcttagataagtaacttctatcgccacattcggtgcattctaaaatgatgttatctgccatttttttcaccacctacacttttattctgactgtactagaatagcatttttcaagctgtttgaccagtattattctttattttgttgaatgaagtttgaaataatcttgtaccattgctttggcaacttgcaatgtgtatgttccttcaccatcagggtctaatcctgggaaaacaaccgccactgctaattttggatttttcgatggggcatagccaataaaggttgcattaatcaattcgatattgtgctttctattagggtgttcagcatcatagtagaaagtttgtgcagtaccagtcttaccagaaattgatggcttaacatttttcaatgggtgagcagttccccaaccatttgtaccgtgaacaacacgatagaaccctgtttgaaccacattaagttccgcaagcgtccaaggaattacttgttggacatttggcttcttattgtagctaatgtaaatcttcttgccatttttgctagttttaccaactgattgcacaatataaggttgcaatctcttaccaccattagcaatagttgacacatattgggctagttgaattggtgtataagcatcatagttaccataagctaggtcaagtacagaaccggaaagaatattacccttgtcattaaatgacttaccttcaattcctgacacttcaccaggtaggtcaacgcctgtcttttgacctaagccaaacatagcaaaattacgccgtaaaatgtcaaaggcatcgtttggcatatgaatgtagctcttcggtacataactagccttaacccatttcattgctaagtacatcatgtaaatattactggagacttccaacgctgtttcagcatccaatgaactgaaagtaccaactggataaactgactttttaactggtgaacctggcaaataaattgccgtatcaggcaaagtattgttttcgggagtaataaccttattaattaatccaccaccaacagtagcccccttaacaactgatcccataacaaaggattggttaattacacctaaagcattatcagtcgttttaccagtgttcgtgtttcgattaatcccggctacagctagcaaagcaccagtctgaggattcatcgccacggcataggcaccattagagtatcttgctgcaccgttaccaacagctgtactgtaaacccgtttcaaagtagcctgtacttgcttttgatacttagcgtcaatcgttaacattaagctggcaccggcttgaccattataaacagtcttagtctgctggatattaccattcgatttagtaataacctggttagtcgacttagttcccttcaaaagtggctcatattctttttcaagataggaagtacctacccggtcgttacgtgagtaaccatttcttaagtagtactgcaagctatcacttggtaaaccagatttttcagttgaaaccgaaccaatgatactttgaatagatgaaccatttggataagatctttgccagtcagttccgatacccacaccaggaagctctgataagtgctcacctacttgggcaatttcacgatcggttaagcctttattcttgatataaatcgtggataaagtataagcccctgaaatcttattaaagattaaagccgctgttttttgccgagtggttagttgaggattcattttttcaacataagccaattccgcttgatagatttcagctgaagtcttcttattgccatcagcatcaatcttggctgacttcggcaaagcattagatatcttagtattattatcttcattagctaaataataatctgctgccatttgctttgtcggcttttcatcgctaatcttgatataattactcaaggcattagatatcttgtaaatatctgctgttgtagtcgaggcactcttagtataagtaatagcattggttgctttattacctactaaaacgcgtcccttagcgtcatacatgacaccacgtggcacttgatgcgaaacaacagttgaatcagttttttgcacttctgccttgaaacgtgaaccataaactagttgcaaataagccaattgcccaattaacatggcaaagaggactaaaattacccctagaatgattcgcattctaattggagttgaggaatgcttgtttgagccagtcccactattttttctaaaataattcacgtaaatcacctttattaaaactagatgtattttaacaaaaagtaaacatcaattctacaattcataagggagcttatataatttttaatgatgcttaaatttcttaactcacgacacattgcaattaatcgtaaaaatatttttttctggcttagttttttgctaccggctttgattttcttgagttactttttctacagcaaaaatggagtgctcactgtcgacttaggtcaacaatatgttgattttcttgccttcttcaggcgaaatttgttctcccatcccttgcgcttaatctattccttttctaatggtttaggcggttcaatgctagcaactgatgcctattatctctgcagtcctttcaatctactcttatttttatttccgcaacattttttgccacaagcaattttaattattatcgcattaaaaattggagcggcgggactatcttcctactactattggaagcaaaaaatcactaatcacttttacgctttagcggctagttcggcttatgccctttcaggctacgttattggcaatcactataatctgatgtggcttgattctgtgattttgcttcctttattgattaatgccatcgaccgcttgctggcccaacgaaaaaataagttaattttaattacctttttgctttggttcactaatttttataccggatttatggcattagcctttggtttgctttatctgttaagcaaaattttcttcatcaataagcaggagcgcctacgccttaactggatttatttaagaaaaagtatcgctggttcatttttagatgcctttatgctcttccccgttctgattgaaatgttgcaaggcaaggctagttctactgcctcatggaatttgggctggcagttttctccagttgaacagctgactaagttagccgaaggggcctataactttcatgaaatgcaggaagggatgcccaacatttatctgacaatgcctttcttgttgctgacaattttatattttttaagcaaaaagattaactggcagcgtaaattagcaaacggaattttactcattttcttaattgcttctcttttttggacaccactggttttactctggcatttaggccaattccctgtctggtatcctggtcgtttcagctttgtgttgatcttttttgcgctaaatctaggcgttattgcattagaacaaaaagaacgtatagcttattggcagaccggacttctgactctattttctttaggtttaattgtttatatagtatttaatgcctcacattttgactttctaactgaagatgcgcagattgccacgggagcttttctagccctcggaatcttgtttattggctttatttatcatcaacacagttttgccgcgccatttttttatttagttatcgagcttgagttaatcgtcaacctagtactatctctaggcaatttagcttatcaaaaaaatagcgattatcagaactttaccactaatgtcagccaagcagtacaatacgcaaatcaacatgattctggattttaccgaactgaaaagactttctatcgttctgatgatgatccttttagcgctggttattacggtttaagtaattttaattcgatttctgatcaaaaagtactcaacctgatcaacaatcttggatttctaaacaatagtaattcctacactaattttggcggaactactttgacagatgatttacttggaatcaaatattatcttttgcctaatgatgaaatcacaacgatcaagtctggtaagcaaatgaagtatgacaattccaaccaccgcgttgatgccagcgattatcatttgcaaaaacgcttttcccaactatatctagtgaaaaataatgccgctttgcccctactctttttaacatcacaaaaaacgcaaaaaatcaattttaactctctagatattactagtaatcaaaccaaattctttcaagcagttacaggggcaaaagtgcagctgtttaagcagatcaattggcctaaagcaaaattaattaatgtaactagtatgaaaaacgatcaactacaatataatcgtaaaaacaataagcaaatcgcacgcatcattttcaatttcaaaccacagactgatgattcttactacattgaaatgcccggtgagatcgatgataatgccatttcaatgacagttaatggtgctaatattaatctggcagtacgtgatcaaaatgcccgtctcattaatctaggtagccaccagcgtggtcaacggttgcaagttacttttgaactaaaaaaagataaactagaccttagtggcattcacttctggcgcttaaacacacaaaagctcgagcagattatacatcgttttaagcaaaaacaaccaaactttaaacaaacacctgctttgatcatcaaatctaatcatttcacaacgaagaagatgatgacattggcgtcaactattcctaataacattaactggttagttttagataatggcaaaataattaacaagaataaaaccttgttcatgaatgcttttttaaacttcaagttgaatccaggaaaacatcaaattacattaatttatgtaccatgggttcttctactggggatgttggttagcttaattagtttaacaattttattaatttgcaagaaaaaagccactgttagcgctaacagcaaaacttttactagacctactgtataaaaatataatacaatgtatacgttatcattcggataaattaatatagaaagaagatttacaacatggctcttaaataccaaattggtgttgatgcaggtggtacccactcaactgcaatcgcatatgacgaaactggcaaggaaatcggtcgtgcagaaggcggcccaggccaaattaacgctgactacgaaggcggaattaagaatatctctgacactatcaacgaattgatcgacaaggttgatggtgactgcatgcgcgttcttgttggtattgccggtctttcagttgtcggtaatgctccagaagttgccgcaactatttcatcaagaattaacaacttacctactcgtgctattactgattcacttttagcactttacgctggtcttgaaggtgatgacggtgccttagtaattgccggtactggctcagtttacaacggtttacaaaacggccacttaatcgcagttggtggctacggcaacatcttaggtgatgaaggctcaggttacgcaattgctcgttcagcaatgcaatctgctcttcttagctgggacaagcgtgaagacaacgctttgattcaaatgtttactaaattatttggcgttgaacacatggatgaatgtaacgctaaattctacaagatgtctaacccagaagttgcaggaatggctgttcacgttgcacaacttgctgatgaaggcagcgatgatgcaatcaaagttattaagaaacaagctcatctgttagcccgtgacatcatcatcggtcttgaccgttacgaagatcctaagccaatgaagattgctttaaccggttcagttttagctaacaacgaaatgcttagaggattggtagaagatgaagttaagaacaagtaccctgacgctatcttctcaatctccaacggtgaaaacgctcgtgccgtattgttcgacaagagtaaggactaccgttacttcactaaccacgaagaccgctaaattatcttttctgaatagttacaaaaagctcgaagttactacaatttgtagaagcttcgagctttgtttatgtttaaatttctgctggtgtattacgattaaagatataaatgtcacttttagttttttcccctagtattcataataagactacctataatcttttaaaattcttttaaaagcaaacgctaaaaattgatattttgtatttatagtatatagtactatatagataaagtaatacgttttgtgaatagaggttgtactatggctcaaattagtgtaaaaatcgatgataaattaaaaaaagaagctcaagatattcttgcttcatatggggttgacatatcaacaggaattagaatgtatttcaaagctattgttagaagtaatggcattcctttagaactaagacccatgacagaactagatgaagcgaactatgaagctgataatcacatttatcatggaagttatagctcttttgaagaatacaaaaaggccatgcggaaataatcatgcaagttaatcctaccaagcgctactaccgcgcttacaagagatatgaaagaaaacattatccaatggattatgttgatgattgtgttgaagcaatattaaccaatgacaaagaatttctagccaaacataaagatcaccctgtaggaaaaaatcgcaaaatgcacgttaatcgtcaatataatgacgattggctattgtactaccggattgataaagaaacacatgaactaatcctagttttggttgcattaggaacacatgatgaactagatcgatttgccaatatgtaatagcatgcgttgtattgaacaaaaacagattaatgcagagctcgaagttactacaatttgtagaagtttcgagctttattttgttccaatcacgctaatgatgttaataataatttttgcaactgtaacttagctgcatcttggttagcctgttctggttgctcatgattcaattgacaattctcaagataatcatcaatacccgctttgaaatctttcttcaactctgccagagaatttccttcataagaaataaaagtattttctagacctaagacttcgccaaataaagtatcattttcaacttcgataagtaccttggtaacctttataagttagtaggctcatagtcttatacctgccattcttaatccattcttcaacgttcttaattgatattgtttaagcatatttcgaggatgtggtttgtgtaattaaagattattcacctctcttatatattccatcactgtacaaaatttggaattcaaaatttaggcttgtctcccatcatttattacgcaaaaaatgtctaaattttttgaaaaaagttaatttttcaaatcaaaacaaaagaatcattacatgaactacatttttgatagcgaatacaatatttttcgcttcaaatacatagaatttctttcctttttaaaaaaattctttaaagaggctgtttccccttgtaaatacgcggattactgttaaaataagtaatcgtagtttatattaaaagaggtatttttcatggaaactatttctaagaaacaattagtagatcaaatcgctgcaaagactgatgctactaagacagacattaacactattttggacgcttacatcgacgttgttaagagcaatgttgctgaaggcaacaaggtacaattagttggcttcggtgccttcgaacttcgtcaccgtgctgctcgtaagggtcgtaacccacaaactggtaaggaaattgaaattgctgcatcaaacgttccagcattcaagccaggtaagagcttcaaggatgaagttaacaagtaataatttattattacaaaaaagaccgcgagttttctcgtggtcttttattttgcctcagaacctgccattaacaagacttttccctgctcagtttcgatcatctcgcaatctatgccaaagttttgcctaatcgtctgcgccgtaattacctcttctggcctgccctgcttttgaatcctgccttggttgagcaaaattacctgattactatattgcaaagcctgattcaaatcgtgcaaaatcatgcaaatcgtcaaattctgctttcgattcaattttttcactaaatccaaaaagcgatactgaaaatgcaaatccaagtatgttgttggttcatctagaaaaagatattccggctcttgcgccagtgctgtagcaagccacacacgctgctgctgaccgccagataattgcgctataaacttatctgccaaatcagcaatctctagctcctgcataatctgttgaaggcgagcagatccattttcttcatcccccatcaaggaatgatacggcagacgccccattttaaccagttccttgacagttatctgatcatacaattgattctgctggtggacaattgctacctttttggcaaaatccttcgcagctagctgccagatatcttgcccatctagcgtaattgtccccgcagacggccttattgcccgtgtaagcaagcgaaacaaggttgacttgccagatccattaggaccaattaaagtcgtaatctggtgctcctgcaggctcagagagaattgattaaataattgttttgacccatatgaaaaatcaatctgcgacgctttaagcatttttctgcctcttccataaaattaaaatcataactggaccaccaacaatagccaaaataatattagccgcaatctcattcggtgctgtaatcacccggccgatggtgtcaacgaacaataaaaaccaagctccagcaaaaatcgaaaatggaatgattttttgataatcatatcccaaaagcaaacgagcaacctgtggcacaataattccgataaaagctaaaacaccaatgcaagccgttgttgttgcggccaaaaccactgcaattagcatcaagactaaacgcagggttttagcagaaacacctaaagacgtcagctcttcatcattgaccttcaagtaattagcccaattcataaaacaaatcgcgaaaatcagccctactacgccaataatcaataaatacatcgtcgatccccaactacttgtggccaggctgctgccactattttgactattagtgaaaacttcctgcatccccgtgaacactgcattcaatgccactccgatgataattaactgataaggcgtcatctttttttggaataataaaagaagcccaaacgctagcagtccgccaataatcgcgaaaataattttaccaaagaaaatttctggcaaaataataaccgctagcaattgacataaactggctgcactagagatccccataattccaggttctgcaatcggattgcgcaaagttgcctgaaaaaaggcaccactaacagagcaatgtcattaagttaagacattgacaattaagggtgcttttttagagatcgaatcatttggattcgatctctttttttgtataaaataaaggcgaaaagaccagccttttcgcctatcttatatattatatattttaaaccttcaaaattattgccagaaagatggtgttaattatgaaagcccttcataagaatattctagaacgtcttgatcaaattatcaataatactggggatcatattcacgattttattaataatcctcatgcttttaccaggaaacgcactttagatgcagcgacagtccttaaaactacaattaacatgcaaggtcagaatttaaacagtgaactctttagagcttttggcgaagatgcaactaaaaagaacgataaagtagttagtacttctgcctatgttcaacgcaaaagccagctttctcctgcttgttttaaacatattctgactgtttttaatcaaaatctatttaatattcaactttttgatcatcactaccgtttgtttgccattgatggctctgactttaatcaaatctggaatccgaaatcgaataacattgtacaagcttcttctcataaaaagaaaccctattgtcaaattcacgttaatgccttatatgatctattgaataatacctaccaggattgtatttttcagcctaaatcagaaatggatgaacgcaaagcggctgttcaaatgcttaaagctttgaattgtggtccatatattgtaacaatggatcgtggctacactagtttcaatatgattgaaaactgcaatcgcctgcctaactgtcattacataatacgaactaaggctggacaaggcggagttaaagaaataacgacattgcctgatcaagaatgtgatcgtgagatttcctgcctggtaactacttctaactattactacatcacgcataaagccagtgagaatattcaccatgtccagcatcattatcgccaatatattaagtatcgctctaaaaatacccaggatctaagctgggattttggcgagttatgcacaataaaatttcgagcctgcaaatttagaattaatgatgccaaatcaggcaaagaagaatgggaagttgtgctaaccaatcttgatcgaaaaaattatccgctaaaaagaattaaagagctttatcatctgcgttggggtattgagacctccttcaagaaattgaagtattctttaggcagtgtacagttccattccaaacaagataaatttattgaaatggaaatttatgcccatatgattatgtttaatgcaatcagtcaaattgatgcacaggcctatattccgcaaaagcattgcaagtatcaatatgccatcaatttcaagcaatcatgcttgattattcagagcatgtatttggcttcttctttaacgcaagattttgaacggatccttattcagatcagctattataccattccaattagaccaggccgcaaggacaagagaaatattaagcccaaatcagctgtatattatttatatcgcgtagcttaaaaaagcagaatctgtgctatgccttatttgttgtacgaaaaaagcaccaatttaaccaattaaatgttaaatcagtgctttaaaagtctaatattaattgtcaatgtcttaacttaatgacattgctaacagagaggctagctcctgctactagtgccgaaataatccgcgggacacggatattaaacaaaatattcaattggctgttagtcatcttttgcattgaaaaattgcttgctccgtgagttaatgcaaagaaaatcgtactgattaacaaaactgctaaaatcaagtttatccaaattacctttttcttcattttgatcactttccagggtacaaccagttgcttaatttattcaatgcttgagaaacattcatgttagctgaagcattaaagtctggttgctgtaggtcataaactctgcctgtctttacggctttcatcgtcttccaaacagaatttttcttaaactcttgcttaaattgtggcaaagttacatttggtaaagcatgttctaatcgcaaaatgacatctggatttttagtagctagcgagtcattacttggtgacaaataaatctgactatcagagtgatagatattttccccaccagctattctgaccaaatcacctaaatatgatcgattagttagaatcatgtaattagcgccaggcaagcccatcaagatcaatactctaggcttacgaccgtgaacacgtgctttagcctttttaacggcttttttgattaagccaatctgataatcagcctgtctctgccggtaatactgcttgcctaatgaactcagtgtagcttcaaggtcagctactgaatccagcttcaaatatgtaactttaacgccttgttctttaaatgattgatcatactgatcttttaaagttgagactgcatagacacgagtgggattcaaagaagcaatcttttcaacacttggcttcattggactcccaatcttgggcaccttttgatagcgtgctggtaacttagcctgcgtctttggaacccctgctaaattaacgttcaatttatcaaaaatttcagtaatcgctgcacttgtggcaacaatcttttcattattggcaactttttgatcaatcaatcgtttagcaccaattgccactccgacgattgctactaaaaatataattaaaccaataattaatcctttacgttttttcatttactttttctttccttggcatttacgacaatcaaaacagcaacgccaattaaaattaacgaactaagcactccagccaaaataacataataaaaatttcgctgcctttgttgattagcacgttgattgcgtgcattctgcgctatttgcctgttagctattgccgcttgcttcttttgtgccaattgctccttaggcttaacactcttgtttttcacctgtggcgcgctgcgttttatcgcactttccgcatgacttgctcgctcttttttatttgttaacttaggcaactgtgtagtgtcaaaagcaaaagtaatattgtgtgttgcttggtaaacatgtggcacatctattttaatttgactagaaatatcacgttttaaattattagtgcgaaaactatagcgataatcatagtcactgccatgccgcgtttttactacgtttagcggtgcttgtccatcaatcgttaacacctgaaccggatagggacttagatctttcttagtgcgaatcgtcatcgttaccaggtactgattgtcgtctaccacaacctgagcaggacgcgcatagtagccatcagccatcgaggtctgatgcgtgccatacttgtaagtgcgataactcacgctttgtgcactaacagtcacaccaaaaataaacaaacaagttagcaacaagaaaggaaaagagataattttagctatatttttcattatttctttctcttcaaaattttatttcttaagtaaaaggccaaaccaataattgcagcatcaaatgctaaaaagcctgcgatcacaggcaaaaatggatattccaccgctgcaatcgtcgccatctttttcttcttgggtgtcatctttgccccaggttttacactagagtttgaagaagactgctgctttttaactggctttgactgcggttgagcgctacttgtagcattttttgcatctttactactgtcgtcattagctgcagtaatagcatcactagtactacttgaatcagtgctactatttgcttcggttaatgccttgcttacagtcgaactgtgcgccacattttttacaccaaaagcaaaccagaccttaaacaaacgatcatgaatattggcaattggtacgctcaagcgcagactcccctgagcctgcttctttaactgatttagcgacttgaagtggacctgataagtccagatatccttgccagcttgtttggtaaaacgcaggtttgaaattgaaccaattcccagtgaaaccggctgaaatttggtcaccatcccatgctttacctcaacttttaaggtcataacatagccctgctttactttttcaatcctggcatgatgcgtgtaaaaattatttgctgcagaaacgccactgcgatccgccttatagaccgcataattgatattttgaacctttttatctgcgctgaccgtgtgtacttttcttactaacttttttgacgctctttttactagccttcttttgcttcttgtcggtctttttcttgctagtagttaaaccgctaaccttgtcatacttcacccaagcttgttcggtcatcttaccaccaaagtcaatagtgacttgcatcttgacccaaccattatttttgaaagcttttcctgcaaaaacaaagtcaaaactagatttgtcggcggaaacattttcctttttaccgctaacgccattaatcttgagggattttacaatcttatttacgttttgccccttgcccattggactatttttaccatcgacatggattgtcatcttagtcacatgcttttgactaactgttaattgcaccttatctcccacaaaaccttgagccattgacttagcatggctgcggtgatttttactgtatttgtaaaccgtcattcccactgtcttttgactttgttcagcggccattacaaccggattagtttgcataaatgccactccaggtgccattaaagtcattgcgaccgaactacttgcgattaacttaagtaactttttattcattctaatatccttctttttactattaatactattagtcttttctattataaagttcttaaaataactatgcaatcggtttcaagatgatattttagagactgtaaaatagtttgtgtaaggatgaatgattccttaaatttatttctttaaacattagaaaaaggagttcctttctcgtatgattggtttgaacaaaaaaacacatacagaaagaagaactccttcatgaatgattttaccaaagattttgctcaagctctattcaatccagacaaaataaatgatttattgcgcaaagagctacaacaggctgttaataacttgttagaagctgaattgactgcctttctgggctatgatccctatgccagaaatggctggaatactggcaactctagaaatggtgcttatttccgcaaagttgatacgcaatttggcccaattgaagtgcaagtgcctcgggatcgcaacggtcaatttcatcagcacacgctgcctgactacaagcagcactcggatatcttggaaagcatgattatcaagctttactccaagggcgtgaccaccagggaaatagccgatctaattgaaaagatgtatggcagccattacagtccagctcaggtatcaaatatttccaagcagatgattccaaaggttgaggcttaccacaaacgcaagctaagcgacaagtttttctgcgtctatttggatgcgacataccttcctttgcgccgagaaacatttgagcgtgaagcagtctatattgccattggcatcaagcctaatgggcacaaggaggtcattgactactgcattgcacctagcgagaacattgaagtctggacagatatgcttcaaaacatgaaatcccgaggcttaaagcaagttgagctttttctttctgatggtgttgttggcatgaaaacagccttggccaggacttatcctaaagctcattttcaacgctgtttggttcatgtcatgcgcaatatctgcgctaaagtacgcgtcgacgatcgtgaaaagatcatgaacgaattcaaacaggtgcatcaacagacaaacaaagaagaagccacagctgtcctgcatgacttctataccaaatggggcaaggtttacagccatgttatcagaagcttgaaagacatagaaccagatctgctggtcttttataactatcccaagcagatcagagcttcaatttattcgactaacatgattgaatcatttaacaatgtgatcaagcgcaaagctaagcctaaggcagagtttccaactgaacagtcgcttgatgcttttattggcattcaggcaatgagctacaatgaccgttatttcaatcgaattcataaaggctttggtcaggttcaggacaccttagaatcctactttgattaaataaataattaaaaaatcaatttacgagaaagaactatttacacaaaagatttgacagtttcatattttattcagtttattatgctcataaaaaaataaaataacaaaaaatatattgatttataacatttatttgattataatgtaagcgatatctaaaattcgtgggaggaaacttttatgagaaaaaatactaaaatcattttaacatcacttgctttactcgcaagcgctagtgttttggcaccatcagctgtagtgtctgcagctgatcaacctgctactaatgttgctgcaactactgctactagtcaaaacagcgacttgcaaactatcactatgactattaccaaaactggcagcactaccccatcagaagctgctatgttcttgggcaactctgctcaagttaatgttaaagacggtaaagttaccgaagtaattattcacgttgatggctctaaagcaccaatgaccaaaggtcaagacatgtctaagatggttgctagcctaacattgaatggtgtagccggcaagcaagaaaatgttgctaaagacggctcatcccttgactatgttttctcagcagatgcttataaagaaggcgctggcagcttagaattcggtcttaacgttatgggcaagaccatgaacgaaaaggctgatattactttaggtaaggtcgctgaagacactgctaataaagatgccaatactacatctgacaagactcaaactgatgccgctgctgctaaaaagacagctgccaagaaagctaaggccgttaagcggactctgaagcacaatgcttatgtctacaagaagaacggcaagcgtgctaataagaaagttttgaagaaaggtcaccgcgttaacacttatggtcgcgcaattaaattacacggcaagactttctatcgtatttctaagaacacttacgttaaaaaagctaacttttaactaaaaatttatttcaagaaaataaaaagacgggcattggctcgtcttttttgtttggattgttatttgagagaaaatttctatttaagcaaaaatatccttaaaatcagctaccacgtctttattctttctgccaggaataacagcgtaaatcacagtggagatgcttgtcggagtatcaaaggcctcctgccacatttttgcgacttcttttgcgttaaagccaaaaacgcctgcaccccagcctttgaccacttgatttatcttagtaaagactaatgatagaggttgagcaactgctttatggcgactcaacaattctctaatcttgtcataaagcttggctttacggtcgtctcccggctttgcttgccagttttcgcccgttttccagaaggtaaagcctaggaaattgctcttcgttggtctaactactttagttttagtagtgttaacttttaagaacagttttctttctagccatgatgtaattgacttcatcacgcgcttagccgacttaccactcttgacgaagatattgcagtcatcgacatagcgaacaaagcgcaagcctctttgttccaattccttgtccattttatctaaatagatattggataggattggcgagagcggtccaccttgcggtacgccaagctttcattggactagatgaatgtcatgcccgacacacttcaaaaagccacgctgttgagcgtggctttatatattttttctattttccactcaaattaagagctatttgagaaatcaaagtatccatgaaatacataccgaaaaagacaaataatgccacaattaagatcttccatgaaatctttgataaatccttcaatctatgagttactgaaattccggcaaaggctaataccgatgtagttaatgataaaaaatctactgcattaattacacgaacacaatatggactaagcaaacagaaaactaatgaaacgatagacacccagcctagaatgggaaatcctctaacaatcttccacggaactcgtttcattaacatactgataataatgccaatcagagaaaacagccataatagacctaggccggcaaaagtatcaggtgtaattggggtgctcttaggattttttactaacttaatctactgaacaaataaaactaaactaacactaagcaataaaattaatgcatctctacctaatttataaaaattattttctctaatcatgttctgggtatacttctttctttttatcaagcaaactagtcaagtgaacatacatgaatctttgcaaaggaactgcgaggaaatacataatataagttccaataaaactagttaacaactgacttgctgccgcaaatgatagaatcgtctcactatgtttaggaaccagagctgctaaagctgaagaagctgcagtcatcatagaacttgatcctactccagaactcatcgcaacagcttgataactaaagcccatccccaaaagaactggtgctaaaattgagaagacaatcgaaccaaaaattgttccaattaagtaaatacctaggactcctcgacctttcggtgaatcaagtgtatatttttcactaatataggctagttctccttctctgcctaatcccaatgttgagccaatggcctcttgtcttaatcctagtaataaagctactggtagtccaaataaaattgtacctaaattacctaactcatgaatgagaaatacccaacctactgataaaatttcattaatcttaggtgcaacatttgctccataacgtgccattagtggcaacattattaaaatcatatattttccagcaaactttactcttttatcattgtagagttgcttaatcggctttaatggaagtaaataaataataatcgctaaaataactgcgaatactaatggtagaattgaaacttcaattttaccaattttgaaaacctgcatccctataaattccgcaatagtgtcaatcaatagcactaaaataattaatggaccataattttttaaagatttcatttttctgctcccattttatttaattgttcaagatattcctgatttgttctacgataagtcctgattttattaagattatttgatatttctaaaacactgttaaagataaattccgggaatatgtccagtacaaaaactggatcaactaatttaaaatcagagccatgaatggttccattccaaccaccatatccaatctgaatagttggcattagataacttacatcaccaatatcaccagctgccatggtatagcctcggttttcaatcaattctgaaatcttgtcattccttaaaaatacattttttactaaagcattcatgtctctattcgaccttaaagtcaaatagccaacctgtgtttctgacttaaaattaccgcctaaagctagggagcatccttctgctgcttgattgaattgcttcattagttgctgtgcatattcgacatcaaagtatcgtatatctgtccccatgctaacatgatcgggaattacattaatcgattctgtattatcacctatcatcactggattaaacctaatttgatttggattttttaattgttgacgtttgaaggccaaagcagtggtaaatagggtggctatactctgtgcatttaccccctcttcaggagcaaatgctgcatgactcgccttaccaaagaagtcaaagtattgaaaattaaatccagctaaatcacaattaatttcaatagtcctacgctcaaaatcttcacctatagcatgaactgatacacaataatcaatatcgtcaaatacgccaagtttgatggcttcctgcttacctccaaagtaagtaaaatcaccagctaacttatgctttttgcgccaattaagatctacaaattcttcggctggagtaaaaataaaagccaaattagtgccaaactcgttgagacgatcatttttcatcagttcatttatcaaagccaaggctgttgtcacctgagtatagtgaccacaagcttgcgccgctcctgtttcagggtcagcatccttatgacctggctgataaagtgaatccaattctgcaataatcccaatagtttttgggcaatgattatcaaacattaccttaagtcctgttttacaataatgttcgatttttatattagtagaaatcttagcaatttctgcttccactgccttagaagttttatactccttatagcctaattctggattgtgtagtaaataccctgctagttcctgtaattctgagtagtattcttgaaaacttgacatttcaatctccacttattcaaatcatcagtaatacgtttgatggcttaaatactacatcgtaattcatactaaatcaagaactatttttatattttgggttatgtttattcgcttttactggagaatttagtaaaatgtttactttaatttgaactacacaaacaagcatccccgcaagaaaaatctcacgaggatgctttatttgtgataaaaaatatttagaatttacgtaaaccatgttggtaaacttgtttatctttttgaccaactgcagcaacattttctaatggattctctcgtaaaactaagaaatccgcatattttcccacttcaagtgaaccatattcttgatcaaccttaagcaattcagcactacccaagccgcctgctcttaaagcttgataatttgtggctcctgctctaactaattccaccaactcatttggtgtatcagaaaagcgattgaagtatgttcctgcatcggtacccattgccaatttcaccccttccttaattgcatgtccaacatgattataaaagtcatcaactactgcacacatcttgcggtatgagaactcaggtacaacatcttttccatgaacgacgattgtccgacctgcagtcaatgttggtgacaaaaatgtaccttgttttttcatcaaagccaagtcattatcatctaaataaaaaccatgttctaccgaatcaactcctgcaacaaccgcataatgaataccgcgtctcccctcagcatgggcacaaaccgtcatatgcttagaatgagcttcttctactgccatcttcatttcttcaagagaaagttcagtatcatcaacttcatcacctaatgacataattccaccagttgccatcagcttaacatttttagcacccttggcaaactgttcacgcactgcccgacgcatgtcctctggaccgttaaccaaatgactagcattttgctctccatttaaccccaccttgaaatcaccatgtccgccgacaattgacattgccattccagttggcatcacttgaggaccttcaaaaggatactgcttgcgcatctgcactaatttacagtcaacatcaaaggatgtgccacaactacgaacataagtcacaccagtttgtaaagcttcacgcagatcccgcagtgctgcataagtagtcgaagcttcagtagtcggaaattttttcttcaagtcagaatcaagccccatgtgagtatgtgaattaatcaaaccgctcatcacatatttccctttaaggtcaacttgtttgtcaaaatctgctgtgcattttcccttaccttgatcggtcaatttacctgtttcatcatcaacgacaaaccaagcattatctactagattatcttcattaccaacgaataaattacaatttacaaaagctgttttagtcattatttttctcctaattattacttacagatgcatccttaaagctgaaattaccacccaagaattctacatttttaacacttggtcgaaccatccaagcttgaccatcatggaataatggcgtcaatccttgttgatcagttaaaacacgttctgcattatacaaatcttctaatcgcttagtaggatttaattccttatctgaattattcatatacttgtcaaaatctttgttagaccatttaccgaagttataactttgtcctgtcatcattgtgtgcaattgtgaattaggatctaaatagcccgaagtcaatccagtaaagactgcctcgaaatcaccattgagcattttcttaactctagtagtcttcggcatgcttctaacagttacatcaacttttttgccaaaggtatcttctaactggctttgcacaaactctaaaacctttttagaaacgtcatcatcgtcacccattaaggtaaaggccaacttattcttacccaattcttttaatgctctatcataaagtttcttagcgcctgcagggttataattcatatacttattagctggatttttgctttcaacatactggtcaaaattcttaccatcaacatattcatttggtccagcaaaagttcgagctacggtattagcaccaccaactgttttagccaattgagctcggttaagtgccattgaaactgctcttctaaaatcgacattagctagttctggatgcttggatacattgaaagtcaagtattcagttctatctagtttatagactgtataaccagattgacccttcagtctctttgaagcctgaacatcaagataggcaccatctaatttgttagcctgatacagattgtaatcagttgaaggcgtcttttgtacactataattaaccgtctgcaatttaactttatctttgtcccaatattgatcattcttttctaacttccagttaagacttgaaccagtccagcctttttgaacaaacggaccattgtaaaccatatacttagatgcagttccatattttttgccaaacttttcgactacgtgtttattttgcggattccaaccaactgacaaggctttaaaatacggtacgggatgtttcaagtgaactaccaattcatatttacccttagcttcaacacctaaagtcgacggagcttttttcccagctaaaacatcatctgcattaactacatttgaccactcattttgctgttgtgattgtgtcttaggatcaagtgtccgtcttaaagaataaacaaaatcttcagcggtcactggatcaccattagaccacttagcattctttcttaaagtaaaagtccaggtcaaaccatctttactctgattagttttagtagccacaccagatacaactttacccgctttattcagtctattgagcccttcaaaaacattagatgcctgttcactaccagttgtatctaccatctttgaaggatccatagtttggatttctgaggtagtcatccaggtcaattcttgtttaggtgctttagcaccagatttgcttgatgaacatgcagataaagtacttacacctaaaagtgctactacagtcgtgccaaataagtgcttcaatgtttttctcatttttatctctcccataagtcaaaaaattaacaacaagcttatgataataaaaaaacgccctactagatcaattgatctaatagggcgtcttcaacgcggtaccacctatttattcgtagaataatactcacaaaaattctacctcatgcacgtgcggctgattctatcaaaatcagcgatacgtcgccgctatagagggcggaccctgaaaatgctaatatcgcactttcagctcaaaggtgattttcacttaattcatcattatcttcttccaccaaccgaagactctctgcaaatcatttcttaagttactttccttatcaaagctcatttttttatttattgtaaacaataatatcatgtatttttaatatgtcaattatttttttatttttttcaattgttaaaaataaaatgatcaattgcctcggcaactgcaccatgattattatcagcctgagtaatgtaatcgcattgctctttcatagcaggattgacattagctacaccaacacccacaccagcagcctgaatcattgacaggtcattaaaattatcaccaatggcaattgtttcttcaatcggcaccctaagttgctcagccagcttcatcagtcccgcgcctttattgacacctttacggttaaattccaaatagcgattagacgaatacgaaatatccaattcttgcgtaattggtcctaattcagcggcgatccggtgcaaataattattatcaagactctcatagagcaccttggcaattttctgcccctccaaaaatgacaagtctttatcttcaatctctttaaactggtgtcgtcccgtcatataggcacgttcatcatcatcgatatgatacgtatataccatatcttgagtgtaaacatgcatggcaatatctagttcaaccccatgccgatataaccgatccgcaatttcattaggcaagccgtcaaaatacagcacgcgattattcttattttctgtaatgctggcaccattgaatgaaatcacatattcattagctgcctgctctaatcctatttcctttaaagtattttggacagaaacgtagcctcgtccagttgcaggaacaaattttacaccgtgagcaactgctttttgaatcgcttctctattttctactgagacatgcgtatctgcgctcaacaacgtttcatctaagtcacacgcaataattttatacatctagtcacctcttcatgcttagtttaccggagacacgcaagcctagcaaggcaacaaatcttgtaaaataacataatccgcctaagtataagtgattacaaaatagtaaaaatatttttcattacatagttataatagacatgcaagcctttaaataacagcgttcttgcgccttgaagacggtaaaaaatcgagactgtaaaatagtttgtgtaaggatgaataattccttaaatttatttcttaaaacattagaaaaaggagttcctttctcgtatgattggtttgaacaaaaaaacacatacagaaagaagaactccttcatgaatgattttaccaaaaatatagcacaagctctattcaatcaagacaaaataaacgatttattgcgcaaagagctacaacaggctgttaataacttgctagaagctgaattgactgcctttctgggctatgatccctatgccagaaatggctggaatactggcaattctagaaatggtgcttatttccgcaaggttgatacccagtttggaccaattgaagtgcaagtgcctcgagaccgcaacggtcagtttcatcagcacacgctgcctgactacaagcagcactctgatgttttggaaagcacgattatcaagctctactccaaaggcgtaactaccagagaaatcgctgacttgattgagaaaatgtatggcagtcattatagtccagctcaagtatcaaatatttccaagcagatgctccccaaggttgaggcttatcacaagcgcaagctaagcgacaagtttttctgtgtctatttggatgcgacataccttcctttgcgccgagaaacgtttgagcgtgaagcagtatatattgccattggcattaaacctaatggacataaggaagtcattgattactgcattgctcctagtgagaacattgaagtctggacagagatgcttcaaaacatgaagtccagaggcttgaagcaagttgaactctttctttctgatggtgttgttggcatgaaaacagccttggccaggacttatcctaaagctcattttcaacgctgcttggttcatgtcatgcgcaatatctgtgctaaagtccgggtggatgaccgcgaaaagatcatgaacgaattcaagcagatacatcaacagacaagccaaaaagaagctgcagctgtcttgcatgaattttatgcaaaatggaataaagcttatagccatgttatcaaaggtttgagggaaattgagcccgatctgctggtcttctacaattatcccaaacaaatcagagcttcaatttattcaaccaatatgattgaatcctttaacaacgtcatcaagcgtaaagctaagcctaaggcagaatttccaactgaacagtcgcttgatgcatttattggcatccaggcaatgagctacaatgaccgctatttcaaccgaattcataaaggctttggtcaggttcaggataccttagaatcttattttgaataaatgattaaaaaatcaatttacgagaaagaactatttacacaaaagatttgacagtttcaaaaaatcatgctaagttagtgtcaaaagaatggggttaataagatgacagataagatatacactaattactttatcaaagatgaagattttgacaaaaaccacttccactacaagaaattaagcatccctcaaggtgtagaagctcagccattagctgtccctccagttcttgcactggataaggaaactgatactgatgtctggttcactcttgaatcaattgaaagcgaaagccaaatattgcctggagctaagaccaagacttggggttataacgctcctttgttaggtaaaaccatggtcttaaaacgtggccagcgagttcacgttaccttaaaaaatagtttaccagaactaacaacttatcactggcatggcatggaagttcctggtcctattactgatggtggctgtcatgcccctgtttatccaggtgaagaaaagcaaatcgaattcactgttaatcaaccagctgccttaacatggcttcatgctcacccatgtccatccaccgctgcccaagtttggatgggattagctatgggcgtagtagtaacagatgaaaacgaagctaaactcccaattcctaaaaactatggcgttgacgagtttccagttattttgcaagaccgtactttccacaaagataatcaacttgactatcgcgctgattatgatgcaatgggcgtcttcggtgaaacaccattaatcaacggcacggttcgcccttatgttgatgtaacaacacaaaagattcgtttactattcttaggtgggtctaaccgtcgtgaatggcgcttgcactttgatgatgacctagttatgactcaaattgcaggtgacgattcatttttgcctcatccaatcaaaatgactaagatcttggtaacacctggtgaacggcttcaagttgtagttgacttcaaggattaccatgatggcgatgtcgttaacctttatactgatgatttcaaactaattgaatttagaattcacaagtttgcacctgacaacagtgttattcctgatacattattcaaaccagaaattcctgaaatcgctgaagatttgccgattcgtaaagtaactatggatgatcacaacaagataaacggcaagcaattcgcaatgcagcggatcgatatgaagcaacaagttagtcatgctgaatactgggacgtaactaataccaactctaaggaacacggtatgttgcacccattccatattcacggcacacactttacagtcgtttcacgtgatggcgaaaagccatttccaaatgaatatggttacaaagacaccattcctgtcagaccaggtgaaaccgtccgcttgcgtgtagaattcccacaaactggagtcttcatgtaccactgccacattattgaacacgaagatgccggaatgatggctcaaatcgaagtattcgaccctaaacacccaaagacatacaagttaatggatatgaagacattaaccgacgcctttgctaaagaaagaggcattaaacctgaagatgtgtggatgccaggaatggataccgaaggttgcggcatggaagttgacagcagttctggtgctagtcaaaaataaaggagcttcaaaatgtgctcaggaatgaataacttattttggaaaattatttgggtaattgtttacgccattactgcctactttacttttaccggcaaaatgatgatggcaatgtactggatggccggtgggatgttggctgaatcggttgtctcactcatttactactttgttaatcgacaaaaataaactttttctcactatttcttccgttactaactttttaactaagtaaaaaaatttatttgacaaaattaaaacgagatgataaattaatagcaataattaaaaaatcttgatgaatagagtaattatagctagctttcttacagagaattactggttggtgagaagtaaaagaaactacttaatgaagatggattcagaatgattatactagtgatatttagctagtatcggggttgctctcgttaacaatgcaagctattgttagatagctattgaggtcagttatgtaaatagctggcaaataaaggtggtaacacgaagcactcgtcctttgaggatgggtgctttttttgcatatgagagaaagaaaaatgagaaaaagaagacagcggaatattattattggcaccattgttagcttattgattatcgtagctggttacttcagcttcttttggacgccaaaaagcaacggtcaaaccaaagttagcgtaggaatcgttggtgccagcaaaggtgacattgcaatctggaaaagcgttgctcaaaccgtcaaacagaaatatgggattattttaaccactaaaagttttgatggttatgaccaacctgacaaggcacttaaatccggtgacgttgatctgaatgccttccagcactatgctttcctcaacgcctggaacaaagccaaccatggcggaattactgcaatcggtaaaacctatatctcacctattcgcttatattccaaaaaatatcatagcctaaatgcactacctgaaggagcaacaattgtggtccccagcgatcccaccaatgaatcgagagcactttttgttttgaaaaatgccgggttgatcaaattgaagaaaggcaaagtattggtctctgttgcagatattactgccaatcctaaccacttcaaaattaaagaagttgcatctgaacaaactagccgcgtgatcgatgatgttgatgccgctgtcgtcaacaatgactttgctggccctgcacatctaggtgacaagcaaactatctttgtcgaaccattgaacaaagactctgagcaatggatcaatattatttgcgcccgcactaaggataaaaataaaaagatttatcaagaaattgttaaagcataccagaccaaaaagaccaagcaaatttacaagaaatactacggcaacaagcaaattgccgcttgggatgtaaaactaaaataagcaataaataagacgagaactacaatgactgtaattctcgccttatttttttataatgactattttttatttcttcaattgcttcaagtgttctttgatcttatctgcagcagcttgcaacttttctttttcttcagaagtaagctttaattcaatttcttcctcaatgccgtcgcgaccaataatagctggataaccaatataagtcttgtattcaggattataaactgaaacaggacaatatagatgagcatcgctaaagactgcttgaactaaacgagtagcacaagtggcaatagcatagctagtatagccctttcccttagccacaataaaggaattcttatttgattgttcactaatcttttcttgttcttcatcaccaaacaattggaaagcaatcttgttgttaactcttaccgttgaccaggctgtaaattgtgaagaaccatgttcacctaaaacgaaaccttctacgttacgtggatcttgaccaagtttttcaccaattattctttgaactcttgcagtatcaaggaaagtaccagtaccaaagacgcgattcttctttaaaccagaagtttcttgcaaaatttgggtaattgcatcacatggattagaaatattgatcaaaacgccgtgaaagcctgattctttaatatctgccccaacttctttggcatttcttgcatttaattcaaactcaccaaagcggtcgcctgtcttaactgaagccgcaatatcaccaaaagcggtaataataatgtcagcatcttctaagccgtcccaatcttgctttcgcacattaacatagctatcatttctagccaaagtatcatgcaagtcattgtattcagcatttactttagcttcatttttatcaattaaaatcagttcgtcaaccatactgtgcgtaaataaagtataggcaacggttgcaccaacatggcccatgccaataataccaactgttctcattttaaaatcctttcaaaaaaacaaaaaggaagatagtcatagctaccctccctttttattattaggctttaacttcgttaattacaacgtcaaacttgccaccaggagtggtaattgatacggtttcacccttctttttgcccaataaagcttgagcaattggtgaatcgttagaaatcttgccattcaatggatctgattcatcactacctacaatagtgtaagtttctggatcatcagtaccaacttcagtataggtaattgttttaccaactgaaactacgttaggatcaacgctttctgcatcaacaacttgtgcatacttaagcatttcttcaacttgagcaattctatcctcaaggtgactttgttcatccttagctgcatcgtattcggagttttctgacaagtcaccgaaagaacgtgcaaccttgatacgttcaataacttctggacgcttaactaattttaagttctttaattctgcttgaagtttttctttaccttcagcagtcattggataagatttttcaggcatatttttaactcctcagaaattaattttctttatcttgcactgatcaataatattaatttacgtcaataatgtcaacctttaacgaactttaatcgcaagatcattttcaagagcagcaacaatcttgtccatcgcgttattgacaacatcgtcggttaaagtatcttttctgttcaagaaggttaagttgtaagcaatactcttcttaccaacatcaatgtgagcaccagcataaacatcgattaccttaagttcagttaagtacttaccagcattagatttaatgacgttttcaatttcttggttagtaactggcttatcaactaaaagtgaaaggtcacgttgaattgctgggaacttaggtgcaggcactgcagttacgcccttagttaacattggaataattgtatcgagatcaatttcgtagccataaagctcgctaccacgaagtgccttatcagcaatcgttacagcgtgagcaatcattccgatcatcccaacatattgcttatcaatgtagattcctgcagttctagttgggtgcatccccttaatgcctttagcctcataaaccactttttcaggatcaataccaattgcattgaacaaattggttaactgtcccttaacaaagtagaagtctaccttttgggttaaatgttgccaattttccgcaaaagtattgccagagtaaatagctgctaaatgttcatgctcgttgaatttaccaccatcatggtcataagttctgccttgttcaaataaagctaattgtgtttgctttctagcaaagttgtaactagcagcatctaccaatccagtcatcaaattctcacgcattgcagaacggcttgagttaagtggtgatttaacttcaactaattcttttggatccttagtgtaacgaacggccttttcaggtgaagtcaaggagtaagaaatagcttccatcaagccttgtccttcaacaattgccttcatgcggcgcatcatttcttctttttctgagtagccaccatgagtttctggcaaaacaggttgagtagattcaaggttgtcatagccataaagccggcctacttcttcaactaagtcggctgggattgaaatatcccatcttctatttggtacatggacagctaaattatcaccatcaacatctaccttaaagcaaagacggtcaaaaatctttacaatttcatcaactgataacttagtgcccaatactttattgaggtatgaagcagtagttttaaccacaactggttcacgcttttggtcagttgccttaagaataccttcatcaacagtagcgtcagcgtcatttctaagtaaaagcgctgccatgttaattgccttttcagtggcatcccagttaacgcctttttcatagcgacttgaagcttcggtccggttagcgtgacgaagtgctgcctttctgactaaagttggatcaaagatggctgattcaagaatgacatctgtagtttctgaagtgatttctgaatcaagtccacccatgacaccagccatcattactggctttttaccatcggtaatgatgatatctttagggtcaaggtcaacttctttttcattaagcaaagtaagcttctcacccttattagcaagtcttacttcaaactttccgttagcaaaagtcttagcgtcataagcatgcattggttgaccagttaacagcatgatatagttagtaacgtcaactacattgttaattggacgaatgcctgcattccaaagacgacgctgcaaccaaagtggtgagtcttgaatcttaatattctcgagcttacgtaagtaaaacttaggtgtaagcttttcatcaactttaacatcgagtgaatctgtccaggctggaccatcttcttttaagacaaccttttcttcaacctttggcttttggtcgataatagcaccgacttcataagcggcaccttccatgcctaaagtatcagcacggttaggagtaatgtcgaagttcaaaatgtaatcatccatgccaagtgcttcatatacatcttgaccaggtttaacttcggcatctgctgggaatacgtaaataccatcgacaaattcttgtggtaccacgctatcgctaaagccgatttcttgtaaaccacagatcatgccgtaactttccatgccacggattttgcccttcttaatcttttcattgccagcaatacgagcgccatgaagagcaacaatcacatcttcacctgcagctacattaggtgcaccacagacaatttgcaaaggttcgttttcaccaacatcaacgtgagttaagtgcaagtgagtaccttcaacgccttcacaatcaaggacacggccgacaactaacttcttcaagccatccattggatgaatacggtcaggaatttcaaccccgctacgagtaatttcttctgctaattcgtatggattttgaccatctaaatcaagaaaatattttagccaattgtatgaaactaacattaattatctttcctccttacggaattgttctaagaaacgtacgtcattggtgtagaagtcacgaatatcatcgataccgtatttcaaaatagcgaaacgatcaagaccaacaccgaaggcaaaaccgccgtaaacgcttgagtcaacacctgcattttccaaaacattagggtgaaccataccagcacctaatacttcaatccagccagtgtacttacaaatagggcagcctttaccattacagttaaagcaagatacatccatttcaactgatggttcagtgaatgggaagtaacttggacgaagacgggtttcgcgatcttggccaaaaacgtgcttggcaattaattccaaagtaccctttaaatcactcatagttacgttcttgtcaataaccaaaccttccatttgcatgaattggtgtgagtgagtcgcatcatcgtcatcacggcggtataccttacctggtcccaccatcttaagtggaccctttgagaagtcgtgcttttctaggactctagcttgatcacctgaggtctgacttctaagcaaatcttcatcatcaatgtagaaagtagcttgcatgtcacgagctgggtgatccttagggatattcatcatttcaaagcagtagtgatcagtttcaatttctggaccttgaactacttgatagcccataccaataaagtagctttcaagatcatctaaaataatgttgattgggtgctttgaaccaagatgtgcttcacgacctggcaaagtaacatcaatcttttcatcttcaagcttcttaactaacattgcatgaacaatgttttctttagcttcatctaattgagcattaaacaagtcacgtaattcgttaaccttttgaccaacttcacgtctattttctggcgcaacttcacgcattgagtgcaaaatcttagttaattcgcccttacgaccaacaagttcaactctgacatcattcaaagttttttcgtctttagccttgttgatttgcttaagcccttcttcatggagctcttttaacttatcaaataagtccattaaatctttcctttcaaaacaaaaaagccccgtccccaatagggacgaagcatcgcggtaccaccctagtttggacgtagcaacgcccacacttaagttttcgttaacggtgaaataccggaattgattagatcctactcccaagatgaaattcacagcgttctttctatcttctcttgcagcttttgaaagaagactctctgttcagaaaaaatatctgctactagtcttgatctcagtaattaattaatatgatatttcttttacctgtttcttgcaagctttttgtaaagatactgtttatatctcatattttttgaattttaggaagataaatatttcataaaaaataatttgttttttatttataaagatctctcacaaatagatataaagaagactgcacttatttttaaatttataaaacaacacaacattctagtagctattccatctcataatcttcttttctttagcttatgttccacctataagatcagaatttacggttacataagtaatctgtatatggattatgatttcgttttaattggctagcttatctaattgctgtaaaccactaatcagagttattaatacagataaaactaagcatacaatagctacgaaaaagattaaggaaggagatattcttactagtataccacttagcgttgccattaatggacctgtaattcttgtcagagacgttgaagtagcagttaccatgcctttatattggtcaggtgtcttagattgaataatggtaaagaaattagcttgagcccatacactaccaaatgatactattgcatatcccatggtaaatattaataaagatttaatggccagcataatagtgaatcctacagtaataattaatccaataactattaattgagtgcctagctttatttttttactaaagtgtagataaacaaagttacccagtatactagcaactgatgagatagtaaaaaatatactaatttcatttattgaagcacgtgtttgtacttttaataagaaagttaacatcggtattactacttgaaagccaacattggcagcaagaaaactaataattaaccatttgatatcatgttctttcaaaacaaattttaaaccttgtgataaggtttgctgtatactcttcttttttttatcattgttctcgttatttgtagtctcaatacctttaacaacataagtcaaatagccaaaactgatcgaatctagcatgaagccaccgagatagttaaagaggttaacaataatagctgctatacctggtccaaatgttttttgaattgaactaatcaggccaactgctccagaaatctttgataactcactttcagaaacagactccgaaattagaatctggtatccagtccaagacattaagtcaactgttccaattaaaaagatcatgaataaaaccaaagctattggaaaatcatgcaatattaataacggaatgatcaaaggcttcaagagtcgcggccttgaacaggtagagctcttcttgtctgacggagtagttggcatgaaagaggctatctgccagtcctatcctaaagcgcattttcaacgctgcttggtacacgtcatgcgtaatatcagtgccaaaatgcgggttgacgatcgaaaaaagcactggatgaattcaagcagattcatactcagtcaaacaaagaaatggctgtacaggtgctgcatgaattctatcaaaactgggaaaaagcctacaaaaacgtagttagagatcttagacaggttgagcctgatctgttaaccttttacaactatccgccagctattagagcttcaatttactcaactaacatgattgaatcctttaacaacaggcttaagcggaaaaccaagcctaaaacagaatttccaactgagcagtcgcttgacacctttattggagttcaggcaatggattacaatgaccgttactttaacaggattcataaaggatttgggcaagttcgagacaccctagaatcctattttgattaaaagataaataaaaaagtcaatcaacgagagagattatttacacaaacttcttgacagtctcctaatttccttaccaaagtatggcttcaattctttattataatcgtaagtaaaaaagctttcgcgattcaatttggtaatttcacgatccatccatttttgtaaggacttattgcccttctttaccgcaccagaaatatactggttaggtccaatcgtcttaatgccgacagtaaacttaggatttcgcttaacccaagcatacagataagaattatcatcggcccaagctgcaccacggccatttttaatcgcgttaaactgctgagttttagagtcaaacttaagcaagtttacgcctttttgtttagtaaaatagttctctgctgtcgtccctttagtaacgatcacgctttttcccttcaattgttttggactagttatcggagctgacttaggggaaatcaccccaaccgatactttcatataaggcttagtccaactagccacgcttttacgctctggtgtcaaagtgaagttagccaaaacaatatcagccttattagaattcaaggtatcaattcaattattggcattaacttgaataaacttaggttttacgcccaaatctttcgccactctgcgagctaggcgcacgtcatagccaacacgcttaccttgtgaattaacccagccataaggcggtagatcgccaaagacagccactcttaaatagccacgacgtttaattgaagatacattattttcattattccatctgtcgcctgaagcagtgccgttaattcctggtcgcgtaattccaaaataaccagcaattaccacaactaccgcaaagaggacagccatgatccaattaaaaatcttttttgccatcattcacacctaaaaatccatactctctaaaaattcttgtgcccgcttagtctgaggtttagtaaagaattctttgcctggtgtttcttccaaaatttttccgtcttctaaaaatagcaccttatcggcaattctcgcagcgaagttcatctcatgcgtaacaatgatcatcgtcatatgttcgttatcagataatctttgcatgatatctagcacgccgcgaaccatttcagggtcaagcgaagcagtaatctcatcaaagagcattacttcgggatgcataatcaaagcacgcacaatcgcaattctttgcttttgtccagctgataattcacgcggatatacttttgcataattagctaaaccgacttgctctaataacttaactgcttcttgtttaacttcagcttcatcacgtttttgaacttttaccggtgccaataaaatattttccatcacggataagttgggaaataagtcataactttgaaagaccatcccaatcttttggcgcaacaattgccattccttcggactaggatttatttttttaccgtgaaaataaattgcgccaccctcatattcttcaagcccattcaccgttctcagcaaagtactttttcctgaaccagaaggtcccaataaggtcaatacctcgcctttatttaagctaaagttgatatcaaacaaagtttgatgcttgccataaaatttatttaaatgctctactcttaaaacttcttctgtcatttcattcacctaattcttagcagttaatcgttttgcccatgcagacaagggataatccaaaataaaatacaagataaagataaagccatatacccaaaacacaccagctggatattgttgattatttgcttcaatgatttgttgaccgacattgattacttccatgatattgataatcattaataaagaagtggtcttaattactctagtagccaagttgattgttgctggtagttctaacttaactgcttgaggcaacaagacataacggaacagttgcaggcgatttagacccagtgctaggccagattcacgctgcgttttgggtactgattccaatgcaccacgaacaatatcgctaaactcagcagctacccacattgagaaagctaataccgccatccaagtagctggccaattgacgtgcaagcttcttggcaaaatataataaaccaaatacagtaaaactacggttggcacaattctgaagaattctaagtacaaccgcaaaacaaaacgcaatggacgattttttaaggttctcaaaataccaaaaattgttcctacagccaagccaattactagtgacaaagctgcaatccaaatcgaggtccatagccctgccatcaaacgggcaaagttacttccttcaaacaaaacattaatccccgaatgaagcataccgtactctcctctcaagccaagttaataataaaataattggaatcaaaataatcgcataagcaattaccagcatcaataaatattcatttgaatggtaatacatcccaatcaagtcaagggctgtattagttaactccggaattgcaattactgaaaaaatcgaagtttccttaattaaaaaaataatattggcggttaaagccggcatgcttaggctaaatccttgtggaaaaaccacatagcgagctaattgtaagttgttcattcctaatgctttaccgctattaatctgactagggcttacgccattaaaaccaccggtaaagccttcagccatatatgctccacctaaaaagattaagccaatgatgctgcagacctcagcggacatttttaagccaattactggaaaggcataatataaaaagaaaagttgaattaaaagcggtgtatttctagctaattcaacatatactgtcaaaatttggcttaatacaggcaccttaaagtattgcaccagactgacaataatccccacaataattgagcccacaatgccaactagtgaaagccataacgttagctcaaatccccgagcaaacacaggcaaggcttgttggataattgtccaattcattaaaaatcccccaatcacacaaaaaagagacccactctcataggtctctttaaacaataaaaaaagatctacgctacttcagttgacgtaaatctccttattttctaattaaagctatttaggcatacgcaaactgaattcttgagtattaaaagcaatgttagatacacaagaacaacagtcagtattaacatttcttatacttaaaaattccattttcgtactcctttcatcttgtcttattttaaataagcaacttacattaagtaatatactttttttcttacttaatgtcaataccctaagcccatttgtcagcccaattatgtacttggtcaaaaactggcttaagttcagcaccttttttagttaaaccatatgaaatgatgccggtattttgatcaacactacgcttgacgatatcttctttttctagttccttcaaacgttcaacgagtactcgatcactacatgcctcaatcgttcgtgctaaatctttaaaacgcatatcttgggtatcacaaagtgaactaataattaaaccattccactttttgccaataatcttaaaagcaccaacaaagtgacagcacaattcataatcttctggtttacaaggagctgcatcctttttttctttaacttcttgcatcgtaagtccctccataattatataatccctgtaaaaataatattatataaaatatttttcagtattactaacattattatagtaaatccgcttactaattacaagtgctaagcgaagcgataaatcataatcccggctgcgacagcggcattgagtgattcagcttgtcctttaattggaatatagagcttttcatcagccaaagaagcaatggttttgcttatgccatgcgcctcgttcccaataattaaggcaagttgtggaactttttcgaaatcaggcaattgcttagcagaacgatcaagcagcgatgcataaaccggaatagctgcatcctgaaaatcggtgatcacattagctagatcacgcttaatcaaatcgatatggaattgacttccttgcatggcacgttgcgttttaggattatacaggtcagcactctctggtgaaagaactaccccatcaaaaccagcagcatcagcagttctgataatcgtccccacattaccaggatcagccaagttatcaagcagcacccacttgccataattaaacggaaattcttttggttgatcaatttttaataccataaaaatttcttgagaattcttagtcgaacttaagtggcgagcaatcgctttgttaattaatacgacattcttcccacttaaatcaacttcatattcactatctgcttgatcaagtgcttcttcagtacctaagatatactgatattttttaccagctttaagtgcttcttcaaataagtgaaagccttcaattaaatataagccttcatcatcgcggtatttcttttgctttaacttcgctaatttcttaatcgttgcattattaactgaactaatttgttgcatatttttctcctttttgtattcaaaatctattataactgataatctattttgatcatgctaaaatcaaagttgaacttaatttaaataagggagataaaaatggaaacaagaaaattaatttgttcaggcttagttcaaggcgttggctttcgttggtcaaccatggcattagctaacaagatgggtattcctggcactgttaaaaataatgcagatggtaccgttacaatctatttacaagcagacagtgataaaatcgaccgctttattgaaaaactacctactgcatctggatttgcccaaattcaaaatattagtcaagaatcggttccaggtgtagaaaaaatgcatgattttcatgtattatattagagacatacatttttagatagaaattaagtggtgatttatttaaatgaaaaaaattaaaagatacgctggagtactggctttattagcagtagctactcttgtattaagtgcctgtggggcaacaactgatccacatgttgcaccgcacagcggtatttacggttgggtttaccaatggttaggccgacctttacaaaatatcatgattcaaaccgcgcacatgattggcggcgataatggtgctggttggggaatcgtgattattacggtagttgtacgtgtaatcttgatgccattgatgttagtacagcaaaacaagagtgtacgtcaacaggaaaaaatggctcgtctgcaaccgcaaatgaagttgattcaaaatgcaatgagacacaaggggatcacccctgaccaacaaatgactttatcaacttggcaaagagagctttactctaaaaaccaagtttcattaactggtggaatgggctgcttgccattaattattcagttaccaattatgtggggaatttatcaagcggtattctattcacctcaattggcacaatccaaattctttggtatttctctaagttccaaatctgttgttttagccattattgcgactgtctttaccgttattcaaggttatatctcactaattggtattccagaagaacaaaagaagaccatgcaatcaatgatgattgttaacccaattatgactttgttcttcagtttatccttctctggtgccttagctctttactgggctgctggtaacttagtaatgattgtccaacaagtaatcgttacctttgtccttacacctagtgttaagaagcatattgccgatgaattaaaagataagccaattgaaactgttgttactaaagaaaaagtggatgctttgtttaactccaatagcggtcaaagcaaggctacaactgaagctaagaaagaactacaccaagacttacgtaaccgtaataaaggtaagcaaaagcgtaaatagttatcagtcaggaggaaaatcctgacttttttattaggaggaaaatatgcatactcaagaaatattacaacttttagatgatcatgatattaactatcaagtattctctcatccagcagtttttacaactaaaaaggcagataaatacttagaagatgaagattttgctaaatgtaaaactctttttattaaaacccgtaacgccaaaaattattatctactaatgttacccgaagataaaaaaatcgattggcaaaaagctaaagctgaattactctcctctagtttaaccttcgctactgaagctgaactagaagaaaaactgcaagttaaaacaggggctgtttccccatttagcctgctcaatgatcaaagtaataaaattcccctgattgtcgatcaagcagcaatggaagaaaacaatttagttggtgtgcatcccaatgataataccaaaacaattagtcttacttggatcgatttagctagaattttaagttcctatggtcatttgtttgaagaaagatcattataaaaaacttcaacttaatcctttttctccataaaaactttattcaaaaaatctttttcaattggatacttcgtcaaataatcttgaacaatcttgttgattctttcctcagctaattcacatggttcttgatttgccagctggtgcaaattattcagtactaatttatacagaaattgccgtttttccttgataatcaacagcgagaagttatgggcagctcgtctttgaaaatatctaatttcatttagccattcttcaaattgacggagagttatcttttctttaaacacacgtgttaaaacaatctttttggctttgatgggcattaaaaagaaataattcgttgcaacaccaaatgacatttctttaataatcagtccgatccctgcttcaccatgagcctcagtatatccctcatatggctcaagatagttttgcttaatatgccgcatgcgcgctttcacatcaccgcggtgaattactcgcccatcttttaattgatatttttcatttagaaactgcctttgatgaattgttcgtggattaagatttctggtgaaatttttaccattctcaataagagctgtttctgcaagggctactttgaagctttgttcaaacaattgcagactgatcatcatcacattttttatatgttgatctaggcaatagaaatcataaatttcttcaaacgttgtttttcgcttaggtttaatgaaatcatcgtcattagtttctatgaaaaaatgatcaatattttgatacataatttcatgatagccataattagcagttacccgatcaaaaagcttttcatcattaataattaaccctatgtcacgccaaaaatcgattctaatttcagaaagtaaatcattaatcattgagctgtctcctatttcatcgaactctccaacaatcgtaaatcgtagtattaccactaatctattcagcaatgtataaacatcaacaccaagaacttttatcctcttcctataatctaataaaaacgctatccaaatggataacgtcttcactcccaattaatctgattcttcagcggcccgtgtagcggcattttcaatagttttaacaggatttaatctaacacgaaagttaaagtagcccacgtgctcatcatcttcaaaaccatactcactataatcaccccaggaaacatagttagatgttcccttaattctgtaaaatagttgggcaatatcaccactgcctagaacaactggatcaaccgctctaatcttttgtcctttcttaacggattgcttagttttctttaatttagaattatagatgtacaaatctgtctgcggaacaatcgtagttgcaccgccatcacgaaatgccggattgccattgatgcgaccaacattcattgccttgatataagcacctctgccaatgtaataatagtcttgacctttaatcttataattcttaattgcatatgatttactaccacttaagtttgtgtaatagtaatcgtcagtttgtgtcttagtgcgacgcttaccagcataatttataattgagtatttaggaaaaacctgttgtccattaaagctaatacgcttaccattcttattgtaaatagcagtgttagcattcagcttcaaaacgcctttgccattcatggtattaacgttattagactttaaatacgtcccatcacctaaattaaaatatgaatcaggataagtagtccaacttttaccagcatatttaatcttgctacctttagttaaataagccttgccaccgcgataagttgataaacgattacccttgctattgtaaatataggtgtttttaataattccgatctcattattattccagttatagctaccaaccgatttcatgttgacataaccaccatcacctaaatctgcataggtttcaccattaacaatagcttgtggcatcccattaagattaataaaagcactgaccctgggtccctgaataacaattggttgaccataaaaattgatcggtttcttaaaatttatccgatcttggctacctagctctttaccattcttattatacaaagttggattggtatagctcttaacagttgtaatcttattcttcagagtacttgcccgaactaccggtgttaattgattttgacccgctaaagctgcaggaacaaaaagcgcagttccagccacaatacttaatacaattctcttaagtttcataatttatgacctctcttaattattttacccttgcatatacattatagtccctttaatataagtcactgataaatcatgctttgcctaccgtttagattcaaaatcaaatctgcattatcttccattacttgccttcttttaccgaaaagcatcaaaattgagaatagcaatggaacgccaacaattaatacagtataaatataatcagtgatttcgccattccaagaccagccagcagaattccaaccagattgcaaatcagaaatataatccattaaaaagtgatagatcatcggcaaccatagttttcctgtatagagatacaattctgcccagataaaggcgctccccattacgccaataacttgtgcaattgttgcagtaaaactttctccatgccagcaaaaattacttaaatgactaaggccaaacaaaattgctgaaccatagattgcaacagggatgcgatactttggaaatctattaaaaccagctaaaaaaattacgatcaataaatagcgttcggtttcttccaaaattccgggctcaatggctgcagttaaattaggaattgagaatttaaatgaaccaatgtcaacaccaaagaatactgtccaaattgctttatcatagttgataaactcattgtaaaacaaatcaatggttgccatgatcaataaagccagcaagatcttcttctgaaagcttggacttttaataaattttaagtttggattgaagtgatagccccaagctttaactaagaaacaagtcatcgttaataaagcaatagctgcgattacaccttgataggtaagtgaatgaagccagcgaaaatctggatttattgctaaattttgtgcatcaccgtactgaatatcaagaaagtaaatagttagcaagcgtaaaaaccaatttttaatcggtccaacatgtacaactgcaattggaactagcaagaaaatataaaccgcccatagcagtaatactaatagaatctcgatagccggcaggttttttagcaaaaaattcccagtgatatgccaaatttggcaaaaattgaaaggaaaaattactatggtcagccagcgaacaatttgagtattagtcttgctggaatcctttttaaattgcacgtaaaagttcaatcccatgatcgccgtactaaaagctagattgaacaaatcccctataaaataaaaatgattattccgctgagaaaaagtataactaatcatcaagagaaaccagataatcaattgatagttaaaaactttctgccagaatttccttgaaaaaatgcgttctttcactttgtcacctcctcgtattatataaattgtaattagtcatattgtgataattaatcaaattagtatttgctttttgatcttcacatgttagcctctaattgtcattggctttggtcaactggtctaggttatcacctcctgcagttttgtctgctttataagtctgccacccagacagttcctttatgctctaactcacatgctgtattgattgcttctttttgctagtccttgagcaattgggattaggtgcagctttcaaagaagcaaccagtgaatacttatactggcgagattgaacttaagaactgtaattaggggttaacatgtgaagatcaaaatctatgatcagaaatttgaaagaaaggaggccatttccaatgaaattatttgtcggtattgatgttagttctaaagatttacaggtcgttgcacttgattcagaagatcaaaacaaacgcttaattaacgatagctttgtcaatgatctttatggtgctagtgaactgaaaaaacaaattttagatctagctcaaaataaacactatgatcaaatcattattggcatggaagctacatctatttacagttttcatcctgcttactttttccaaaatgacgaagatttacaaaagctcaatgtagagactgatgtaattaaccccaaagaaaccagcaggtttcataaagtctttgaagaaagtaaaactgatcctctcgatgcttattacattgctttgtatctaagctttggacattatcgagtaagcattgccagacaagacaactatcttgctttagagcgtttaacgcgtaccagatatgaattagttcaagaactgactcgtaccaaacagcacttcattgaagctttatattatcgggttaataaactaatcactgtcgataaagataagattaatactcctcttttcggtgctacaatgatgtctattgtaaccgatagtaaaactctggatgagatcgcggatatgcctaccgaagacttaatttcttacttacaggttaaaggcagaggacgcttttccgatccagataccttggctaaagcaattaagaaagctgttagaggttcatatcgcttaggcaaagtaatgactgattcaattgatgcagtgctttctgttcattacaacatgattcaaagctttaatgaatctattaaagatctagaaaaagcaattgatcgtatcgttgatgcattaccagaaagcaaaattctggaatcaattcccggtattggcaaaacctatacagctggtattatcgctgagatcggaagtatcgatcgctttgataaagaagaacagctggctaagtatgccggcctaacctggaatcaatatcaatcgggagatcacagcaacgaacatactccaatggccaggactggaaacagatatctaagatattacttgattgaagctgccaatctagcaagattacatgatcctgttttcaaaaaatattaccaaaagaagtatgatgaagctgtctactcgccgcataaacgtgcttgcacattaactgcaagaaaattagtacgagttatctttaaattgctcaaagatgacaaactgtacaggacaccgaggtcttaatttcaaaaattggtctaaatttaaaagtaaacaaaagtttaacattaaaaaaatcaacctttaccaaggcttagtttcatatactcaaatttatgatcaaaaagaacaaatatcatcgcctttcatttgacttattaccacatgacttaagtttaaatatttttagctaattaaatcgcttaaattaataacaattataattcctgaattgtcaaattaagtgcaacagttaggttatgaagagatatattgcttgaagagttcctctgctgtgtgatattggaggattcggcgatatttgtggttaatggcatcagttgcctgttgaacataagcttttgacttgtctttcatgctcttgcccttagggaagaattgacgcaaaagaccattgcagttctcattggtgcccctttcccatggagaatatgggtgagcaaagtaaatctggcagcccttgatcttggtcatatccgcaaactcagagccattgtcaaacgtgattgatttaaaccaggcaggatgtctgtcaatctccttttgaagcagcctttggcatgtgcttgcccgatagtcaggaatcttgataactacttcaaagcgtgtggttctttcagtcaaagtcattaaagcaggctgattcttgcgtctgacgcctttaaccagatctccttcccagtgcagcggagcttttctgtcttcaacctccttaggacgctgttcaatggaattgccaagatgcttcttgtgcaaagcgtgaccgccatggctgtgatgacgcttgttcctgcgtcttttgagcttcataggcagatcaatattgcttatgtccagcaagccctgatcaatatagcgatagacggttggtgtgctgggacaagggtagcctggcatagtccttttgaattcaccaacgaactcatcgatgctggtggcatcaaatttagctttaaagcgtctggagagcattctcaaaaagacagcataatgcttcaatggattgcgctgatagcagtttttgcgacgcttctcataataaatctgtgcagtatcagcgtaatagtgctcatacaataaatagctgctgtctctttgcaggacgcttccgcgtttgatttcgcgactgattgtcgacttatggcagccaacttcttgagcgataacagtacgggaagttatgccggaatccagcattgcttgaatttgtccacgttgtacgctggttaattgatgatagtgcttagaaatgctagaatttgaattggtcatgaagatcttcctttcttgatttttcgtcacttcaagtttaggtcttcatggcctttttgtttaacacttagtgttgcacttcaattttaaatccgggaacaattataattattttcgaagcattttatttcttattttctaatacctaagcctctagagaaaaaaagtcctattaaatcttggtacccaaaccttgatttaataggattttgtttatgcctcaagattgctcttaggcatttgtttcttctcatttaattttcttaacttagcggcttttttcttagtcaaccgagggaacttcaatttaaactggctgccctgaccctcaacagattcaacactaattgttccgttataactagcaactaatttttgtgcaatcgatagacctaaaccattgccacctttttcacgggttctagccttatccacacgatagaagcgattgaagattttcttttgatcttcttcagaaatcccctcaccaaagtcttgcacaataatattaacattcttcttagttacaccagctgaaacattaatctgcttgcgatcagtcgaatatttaatcccattatcgatcaaaattactagcaactgttccaaatgaccgtgatacatttgaatctctgtatcatcaggtaaatcatcctcatccagctgaatcttgaagtcaggatgaaccattgccatatcagcgaccactctgcggatgatttcattaacatcacttacttcatacggatattgaacatcgatttgctcggctcgagttaaatcaagcatttcctgaattaaatgtttcatccgatcagcttcttgcaacgaagccttaattgattcatccaaaatctgcggatcatccttgccccatctttcaagcaggttcaaatgcccttcaattactgccactggtgtccttaattcatgtgagacatcaccaacaaattgcttttgttgctcaatgtaaccttgcatccggtctagcatttgattaatcgaagtagctaattcttctaactcatcatctcgatgtagttccttaattctagcctcactattaggatcagcattaacttccttagccaccttagacatcgtcttaattggccgaactacattaacaaccaaaatataagaaattgcaatgaagataattattgcaatcagtgaaataattaccatccaatgaagcaaattactcatcaagctattgtaataagtcatactattagaaaccactacatagccagttaatttgccatttacctcagaatagattttctggtaggttaaaagcattttgcctttttttcggtttactacttcttcaagttggttgccggcaaattcttttagcttaggtgcagaattaccattagtaaaaacaatttcatcatgtttgttgtaaactgctacattaatatctggattcgaaatcgatgaaatcaggctatcactaaatgctttattctctgtatcttttttgctaatagcaggaccgcccctcaaaatacgcctggtagacggtgacagagcaggaattacatttgagatctctagctcatcttgaatagaacttaatgtccggtccatcgtggtaactacattattagatgtctcttgttgctgttccatcgattgatgactaacaatttgataggcaacaactgaaaatatgacaaaagagaccgtaatcgttaatgcaacgatactaacccatcgcacaattagggatgagtgcttggcctctttttcctcgtctttattcttgatcatcatcttcatctcttaccatataaccggtaccacgaaccgtcttaatgtaagatggttgacctggagcgtcaatcttattacgtaaataacgtacataaacttcaactacgttagtttcgatattagattctggaccccagatcttgtttaataattgatcacgactaactacgttgttcttattttcaatcaaggtcattaataagttgtattcgcgtttagttaaatcgattgccttgccatcaccacggtgcacaattcggttagcagtttcaattgtcaaatctttaaattttacaatcttttgcttagcaacagtaacctttgatgcgtccttttcgattttaacgcgacgtaacactgcgcgaagacgagctaaaagttcttcaattgcaaaaggcttaacaatataatcgtcagcgccatgatccaaaccagaaacacggtcgatcactgaatcacgtgcagtcatcatgataattggcgtagtcttaacttgacgaacacgacgtgcaatttccaacccatttaaatcaggtaacatcaagtcaagcaagatagcatcaaagtcttgactcaatgcatcttctaatcccttacgaccattattctcaacaacagtctcgtaattttcatgttgcaattcaagctcgacaaagcgagataagttcttttcatcttcaataattagaatttttgccatgttaattcatttcctcgtagatcaatttggttttctaatactaataaattaattaaaaaatgcttttataattaaaggatactttaaaagtgcttctaacacaagattaaaaaacaatcaaagtaaaaattttctttgattgtccaccatatttttcaattacatttattacttatttttattgtccttatcattatcttgcccatcaagcaagaccttcaatttagcaaaagctgggttaacttggttcttcttgccttcttcaaaagaggtttcagaaacaacttcccaaccttgaccctctgggaaaatattcttttctttttcttcaggagtcaaaatagtagttggaatatggagtaaaatattatcttctaccgctgtttgcaagtcaatttggtcattctcaacttgtacaatagtatcgttttcttccaattcttccttggttggcttacgatcaaggtagttttcagtaaaagtaaaatcttcatgatagtttaccggcttaaggcttctgcttgatggcacaaccagatcagcggccacatgaaaactgccagtcacaaatggttcttgatagaacaagtcaccgctcacttttacatttttcgcatcaattagtagatctttactacgcttaaaaaattctggacgcatttccaaatcacgttcaatgtgagttaatggttccttggaattttgaatcctagaaaaactaagttctaacatttttacacctcgattggccgtcgaccaaagttttgatcaacgcccattatttgttcaaataaacggtctaccctaacttgtaaagctaaagagccgttcttagcacttcttttatcaactttagagacgatttctgtctgaaattccttgcgctgttgctttaaatatttgcgacctaccttactaaagcctaagagcatcaaagactcatgattaaagctagccaatatatcatcctgagtgacattaagcaaagtatataagctcaaacggcgcaaacgggaataagtataacgcttggacttgatatgccgcaaaaattctgtaaaatcgcgggctaaatgaatctcttgtttcatcttatattcaagcccttcgctcatttgataaatatgacgcaattcttcaactgaagatgattcaatttgatacttcaaaaatggatatagcaaattccaattaggataaattttctgctcagctaacaccattgcttctgctttaggcatccaatactttaaattttttgtatcttcaccatgcaataataaatttcgaatcgcactagcactttggacaactttttctctttgtaaaaggtcatcatgtcctgctccaattcggttgaccggatgcagatttaatggtgaacctaaattatgattagctactgaatacgctaaccccaaaatagcatttggctgattaacttcatagcctacttcatgcgctaccatttggttgtattgtgttgaataagtttggctataatctctaaaatccatgtgattctggggaatttccgcaattcttttacccaaataagcaaaattcaggttagcatcttctacaccaaagactaaatcagttacgcctaatttagcaagttgttcaatgtttccgagagcaaaaagatcagctggttctactgccgttgaaaatggtgtttcaaataccaaatcggcaccagattgcaaagccaccttagcccgctcccacttgctcataatcgccatctcaccacgttgcacgtagttaccagacatgagcaccacaattggatcattaccagcaaccaagcgtgcttgatttagcaagaactcatgtccactatggaaaggattaaattccgcaataatcccaacaacactcattgcttaatcttccttcaattcaacttgcttaccgttagcccatagcttttccaagttataaaattcacgtgcttccttagtaaagacgttgactacaacatcacctaaatcgagcaaaagccagttagaatctctggtaccttcaatacggtagtcagtgtagttgttttcgtgagccgcatcaacaattgagttaacgatcgcatgtaattgacgattagagcctgcactggtaataacatagtaatcagctaaaatactgattccacgcatatcgtaagcttcagtatcttcaccatgacggtcactaattgcttgggtagtaaaatctaaaatttcttgactagtcaatatttttctcctttttattacttaattccccatacattgtatgcttctaaagtacgaggatatactttatttttattttcaattaaaaactctaaggtgtgctgcaattcatagcctaccccttcatcaagactagcataagcaactttgcgcgcttcttcaactcctggaaaatctcgtccgggttcaataaaatcagctacaaagataattttatctaatgtagtcatcttagtatcaccagtcgtatgacgacgtacggcagttaaaatctcaggatccctaatttttaaatcacgttcaataaagaaaatccccacaatgccatgccagatggcccgattccaattaagcaaatctggatcaaaatcctgttccttaattaccttacgatactcttctaccggtacctgcttggcataatcatgaacaaagccagctaaggctgctttttcttcatcatatccatttaacttagccaacttacgtgcagtttcactaacacgaacacaatgttcaaaacgttttttcttcatgtttgccttttctttagcaacaatttgttcactagagaatggtgaataagtatttttaaaaattagtttcgtcaaggtaaagccccttttcttcaatatattctctgacggcttctggtaccaagtaacgaattgaagtgccagttgcgacactgcgacgaatagcagtcgaacttaggcgaatatctggtgcgtcaacccaaatcatgggatattgcggatcttgtggataacctggacgacgaattccgaccaatgttactagtttagccagggtcggagcttccttccaagtatggaaactgttaacctgatcactgcccataatcaaataatagtcattctgaggtgctttttccttgagataacgcatagtatccacagtataagaaacgccgcctcggaacaattccaatagttttaccctaaagttaggattatcgcgcgtagctaaatcaagcatcgttgcccgatctttagcagaagtcagcggagcatttttatgcggtggaatattatccggaataaaccagacctcatccagcttcaacttagtcattgcttgctctgccgctaccaagtgcgcaatatgcaccggattaaaggtaccacccataatcccaatctgacgacctttaccttgttcttgttccaattctgcttcaactttagcagttggcattttttcaatacattttggattaaccatatgcaaacctctaaatcaatgcacgacgaatacctaaaccaatcccatctggtgtgtaagtcttaacaacgcatcccttgggtacagtcacaaaaccaattccaccaaataaaaggtcactcttatattccgttctaaattcttgaccctttagtggtgccatttcatcatctgcagctggtggggataacaattcacctttatgctttttataaaagtcatccgcattagctgtcttagtacggtgaatatacattccacgagcaacgtaaacagtaaagctagtcgattcgcccttgagataatcaatccgtcccaaaccagctaagaataaagtattaccaggcaataattggtaagtagctggctttaaaggcttcttaggtgagaccagctccaaatccttagcatttaagtgcgtagccaattgattctcggtcatgatcccgggcgtatcaatcaaaaagtgaccattttctagaggaatttcaattttgtctaaagtagttccaggaaagcgtgaagcggtgatcaggtcttgaatatcacccatcatgtcaataatggcattgattaaagttgacttaccaacattagttgtccctacaaaatagacatctttgtcttgcgattgcttattaatataagcgatcaaatcttccaagttcaacttctttttagctgaaaccaagaagatttccttaggataaagccccattcggttagcttcttgtctcatccaatccttaatcttactttgcttagagtttttaggaaatagatcaaatttattaccaactaaaataaaatcattatttccaacaaaacgcttcaatgatgatagcaaagaatttgaaaaatcaaataagtcaactacattaacaattaaagctttcttttgtcctaaagagttaagcaaagctaaaaaatcatcgttgttcaaatcaactggcatgatttcgttataatggcgcaatctgaagcaacgttgacaataaacatccgcattttcttcttgctttgccttatctagtgcactttttggcagataacctgctttttcaggatcatcggattgcagcttggcaccgcagccgatacaaataatatcctcatccatttgatagctccttcttaaatgttactcgatgtgataaacccaggaagaaaaagataattttttcaaagaaacgattgattctcgtattccacttatcagtttcaactaatggcttaactagaacagtcttcacgccggccaaattccctgcttgcatgtcagtgattagttggtcgccaaccatcataacctgatctttttgcaaatgcattgcttcgcgcttcttggtgatcgcaaatggcaatggcttacgtgacttagcgacaaattcgatatggtaaggatcaagtaccttgcccactctttgagcattattgttagaaatgaccacgagagtgattcccgccttggctaacttttgattaaaattatccatttctttggcagtttcaaatttattccaggcgagcaatgtattatctaggtctgaaaaaaccgccttaatgtccatttcattcaacttctgggggtccagattgtaaatcgtatcaattgtatattttggtctaaaaagcatatcaacactgctatataaaacatagaaatatgtagaagaatgtatatttttttacatatcagaaagaaatatagtccttcctttcttcgctttatttactgctgtcatcattagtattccaatattccaatctaggagtaatcgcattgactaactcttgcagcttaagggcttagccagccccgttttcattattttgctaaagctaaaagatttaacactgcattatcatcacgatcattagtataaccgcattcataacaaatatactcattgtgcttagtgtgatgtttttggttgccttgcaaagtgattttttcatcaccttttttaacataaccacaattagcacatctttgggttgatggatatgttttatcagccaagattaattctttgccataccactcacatttataagtcaatatctgtctaaacttactgaataatgatctctgcatgccttttgaagcgacgtgcgtcatcatcatttgtttaacggctaggtcttcaatcactatttgatcataattattaaccaattttgtagtgaatttttgcaaaagatcgttttgaatgttggctactttacgataatcacgttgcagtttggttctcacttgcacgtaattattgctttggccagctaacttgccattagcccgtcttttcttagccagcattctctgataatgcttaatgcgcttgtatagtttttgcaatcttgatggcaaaacattgattttgcccccagtgtagttgaaatgtcccacattaacatcaacagctgtctttctacctgttctaggctttaccaaagtttcttcttcataagaaagagcggcataataatgtcctctttctctaaagacactagcaactttaatttgcttcatttttaaagcttcatatgttggaatatcgaaccaggttttaatgcctctgggcttgtctaagcgtagcttaccattaaccactttagcccggtcagtcttaaagccttgtcgcggggccttctttgatttgaaatgtggtttcccccaatcaggctgtgccttatcaaagaaattcttccaagcattagccaaatctttgactgctaattgcaagcatctagcagacagagcaaactgccagtctgccttattatcgactagctcatcacgtattctgcgctcatttggactgggattattatccttatctaaggttcgtgcttcatacatgtcttgccaagtggctaaagcttgattccagcaatatctgcgataatcacaaagcttatccagctcttgttgcatggtcttgttaggttttaattcgactacttgagccttgatcatttgtttcacctccaatacaaacataaatttagcaaagagtgaaataaatacaagcgaacaaaatattaaatttttagtttttgacctgcttctatgttttatatttctgaacagatctttgtatcttgtctatcttttaactgttaatttcctccattttttatcaccttatatcatatcaaaaatgggtttgctttagaaatttttgtttttttctgatgaaaaagtgttacaatactaaacaatttaagcaaaatcatcaatcaacagaaaggatcaccatgagaaaattcatcgatttacaccttcacctcgacggttctgtcccagttgctactgttaagaagttaatgcaggaacatcacatgccacagttaactgatcaaaaattgcggcaagaattgtcagttgataattcttgcgctagcttggaacaatttttggaaaagtttgacttacctaaccagttaatgaagacaaagcatgatctggagatgattgtgtttgatcttctttgcgaattaaaacaacaaggtctagtctacgccgagatccgctttgcaccgcaattacatactaaaaatggtttaacgcaaagacaagtaatcgctgcagcagtcagcggtattacgaagttttatcaaaaacaaaaagcagacaaagatcagcctgaattacacgctggtttaattctctgtttgatgcgcttcgcccacaatgaaaaagaaaacatggaaacggttgagctagcgaaagaatttttaggtcatggcgttgttggccttgacctagctggtgcggaaggcccgatccctcacattaactaccagcattttttcaatcgtgcccaagaattacaccttccttataccatccatgctggtgaggctgcgggacctgattcaatccgtcaagcattaaaaattggcgcgaaacggatcggccatggcattcgctgcactgaagatccagcacttacccaatatctgattgatcaccaaatcatattggaatgttgcgccacttcaaatatgaacaccaaagcttttgatcagattgattcttacccaataaaaaaattattgcacatgggaatgaaagtcacgctaaattctgatgatatgatcgtttccaataccaatttaccgcatgaataccaactgcttgaagaaaagaccgccttgactcctgaagaagaaaccactctttatctcaacgcggttgacgcggcctttactacgccagatgaaaaaattagattacgagcattaattcaaaaatagataaaaaaataagctaggaaaatttccctagcttatttcttttgttattagttcaaagctttcttagcagtttctgctaattgtgcaaaagtctttgagtcgttgtaagcaatatcagctaacatcttacggttcatgtcaacaccagccaacttcaagccgtgcattaacttagaatatgagatgtcgttttgtcttgcagctgcgttaatacgagcaatccataactttctgaattcactcttacgtcttctacggtcgcggaatgcgtacttgtatgaaacgaataattgagtgcttgcagccttaaattgcatgtgctttgcgccacggtaacccttggcaagcttcatgatcttcttacgacgttgacgtgttactgttccacctttaactcttggcatttaaaattcctcctactatagtctgtcttaattaagaacaagtattagtgcatttgagcaaccatttgcttgatacgcttcatatcactctttgaaaccatagcagcttttctcaagtgacgacgttgcttctttgtcttaccgtggaaacggtgaccagtaaatgcgtggtgacgctttaaaccaccatttgcagttctcttaaaacgcttagcagaagcgcggtgtgttttcatctttggcatatttctatttcctccaattaactactttttctttttgtccttatcactcttaggtgcaagcatcaagaacattgaacgaccttccatcttaggcttactaattacattagcaatgtctgaggttacttcggccattttttcaagtacttgttgacctaattccttgtgagtgatggcacgacctctaaaacgaattgagacgcgaaccttagctccttctttagaaatgaacttacgaacgtgcttaagtttagtttcgaagtcgttaccttcaatagttggactcaaacgaatttctttgacactgactgtcttggaattcttacgggcttccttaagcttcttttgttgttcaaagcggtacttcccgtaatccatgatacgtgctacaggtggcttagcatttggagaaatcagagctaagtcaagacctgcatcgcttgcacgacgtaaggcatcacttttactcatcacaccaacttgctgaccatcttcatcaattaaacgaacttcgcgagcgcgaattctgtcgtttaagattaaacttcttggtataactgttcacctccgtgttaatttgaggacaagaaaaaggcgggttataagaatcatacccgcctttaatcaacagaaattatcaatcagcctagaggtttacttaacttaggcgagaagcgggtgcttcttcttgttctcaactagtagtagtatactcgcttaaccattatccgtcaattaattgttgacaattaattgacttttttatcttgtttttgataaagcttctacaaaccatttagaaaaaatttctggatctacagacactgctatttcagcattatttggaagatctagcttatttttaaaatccatcaatgaagcaccatatgtataaccggtttgaacatcaatttctacatgtgtatttttaaatttaaacatttgcggatttaaaagtacgcctgctgcaagtgcatcataaattttaaggccagtttgaaaactgccacctcgaaatttcttaaataagtcgtaaaacatatcaccagcttttcctaactgtcgtatttgattacttacttcaggcataattttagcttgtgcacctaattctaaaggcgctactctaatttttaatccactttcaaaaatgatttttgcagcttcaggatcagatgcaatattgaattcagaatagataccataattacctctacccattgctccgcccataataattagttccttaatattttttatatcatctgggtataaacgaacatatagagcgtaatcagtaagtggtgcaattccaataagagttactttttcagaagaagctgcaactattttatgtatggcaaccggtgatatgccatgatccaccaattcaaaactaggatttggaaaatcatatccgtccattcctgatttaccatgtatttctttagctcgaatagattgtttgactaatgaacgctctaccccttttactacaggaatacttttaccgaaaaatttctccaatttcaatatatttattaaagcttgttgcgcattaacattgccattagttgcaataatacttttaacttcaattgcaggcgaaaaaagacatattgctaatgcaactgcgtcatctattcctggatctgtactaataataactggctttttcattaagaactccacttcctttttggtaatgttcgtattttcaagaagataaatttataaataaatctatttatattcataaataatacaatacgcatacaattaacacaaatgttattattttaattcatattttgtattgacttatttttacatttaaattattctaagacaagataaggaggaatacgaacaatatgaaaataaaatccagtttttggctgctatttccggcatttattagtgtcttgatttttgcattctttccattaattcagattgctataccaacatttcaagattctaaaggatttttgcacctatacactgaatttctaaaaaacacgtacaatcttcatgtaattggtagaacatttaaaattgctttactcactatgatcattgttttaattcttggaattccaatttcactttggattgctcgtcaaaagagcaaagtaagatcaattttaacaattatcattctttttccaatgttaacgaatgcagttgtcagaaactttgcatggatcattattttaggtcgtaacggtattctaaataaatttctgatgtctattcatttaattaattctccattaaacattctttatactgatacggcaattatcatcggttcagcttatttatttctcccgattatgattatttcattagttggtagtatttctgagctaaacattgaagcagaagaagctgctgctgtattaggcgccaatccatgggttaatttgataaaaattgtaataccacaattagtctcagggattttaacaggatgcattttggtctttgcaggtgcgatgacagcatatactaccccacaaattttgggaggtaataaaaatttagtaatgtctaccttgatttaccaacaagccatgacattaggtaactggaaaaatgcaagtgttattgcaatagttctgattattatctctgctttatcaatgatattaatgagaaaagcaagtcgcgctttggatagagactgtaaaatagtttgtgtaaggatgaatgattccttaaatttatttctttaaacattagaaaaaggagttcctttctcgtatgattggtttgaacaaaaaaacacatacagaaagaagaactccttcatgaatgattttaccaaagattttgctcaagctctattcaatccagacaaaataaatgatttattgcgcaaagagctacaacaggctgttaataacttgttagaagctgaattgaccgcctttctgggctatgatccctatgccagaaatggctggaatactggcaactctagaaatggtgcttatttccgcaaagttgatacgcaatttggcccaattgaagtgcaagtgcctcgggatcgcaacggtcaatttcatcagcacacgctgcctgactacaagcagcactcggatatcttggaaagcatgattatcaagctttactccaagggcgtgaccaccagggaaatagccgatctaattgaaaagatgtatggcagccattacagtccagctcaggtatcaaatatttccaagcagatgattccaaaggttgaggcttaccacaaacgcaagctaagcgacaagtttttctgcgtctatttggatgcgacataccttcctttgcgccgagaaacatttgagcgtgaagcagtctatattgccattggcatcaagcctaatgggcacaaggaggtcattgactactgcattgcacctagcgagaacattgaagtctggacagatatgcttcaaaacatgaaatcccgaggcttaaagcaagttgagctttttctttctgatggtgttgttggcatgaaaacagccttggccaggacttatcctaaagctcattttcaacgctgtttggttcatgtcatgcgcaatatctgcgctaaagtacgcgtcgacgatcgtgaaaagatcatgaacgaattcaaacaggtgcatcaacagacaaacaaagaagaagccacagctgtcctgcatgacttctataccaaatggggcaaggtttacagccatgttatcagaagcttgaaagacatagaaccagatctgctggtcttttataactatcccaagcagatcagagcttcaatttattcgactaacatgattgaatcatttaacaatgtgatcaagcgcaaagctaagcctaaggcagagtttccaactgaacagtcgcttgatgcttttattggcattcaggcaatgagctacaatgaccgttatttcaatcgaattcataaaggctttggtcaggttcaggacaccttagaatcctactttgattaaataaataattaaaaaatcaatttacgagaaagatctatttacacaaaagatttgacagtttctttggataggagacctaatattaatgcttaatcgtaaaaataaaactttagcaattatttctattattatcctgatattattgatgtttcctctacttttagtaattattacttcatttaataatcaggattcaatttctctaccaattaaaggttttactttatcctggtatgccaatatttttcagcaaccagattttatcagtggatttgaatcaagtttgttcgttgccattattgctagtctttcggcattaataattggtatccctgcagtttatgctttaacaagattcaacatcgttcataagtcttggtttcactctttcttcttaagccctactctaattccagaaattgtaattggctttgccttatatcaagctgctgtcgttactcttagactacctgttatgcctagtctaattattggtcactttttattatgcctaccttatgtaataagactagttacagcaagtatgttactaatggataaaaatattgaagaagcagcttgggtttgtggatgttcacctcagaaaggattcttcttaatcgttttacctaacattaaagcaagtattgtagcagcctttatgatgtgttttattaattcatttaataatattccaatttcattgttcatgaatggaccatcaattacaatgctgccaccagcaattttgaactatttacaaaacaactatgatccaactgtttctgctatttctgtagttctaatgatttttacagcattaattatgcttttaactgaaaaactagttggtctaaataaacttactgataggaacaattaaattggcaattttagaagtaaaagatttagcaaaatcatataacggtaaaaccaaagtattaaaagatatttcgttttccgtaaaaaacggtgatttagtatctattctaggaccctcaggttgcggtaaaacaaccactttaagaatcatagcaggtttaattccagcaacagacggacaagttttagttgatggtgaagatgttggaaaagtaccagtttacaaaagaaactttggaatggttttccaaagttacgctttattcccacatatgaccgtctttaataatgtagctttcggattaaaaatgaaaaagatgtctaaaagtgacattcaaaaaagagtcgatcaaattttaaaaataaccggcttgtctaaattagcttctcgctatcctaaagaattatctggtggtcaacaacaaagagtttctttagcacgtgcattggtagtcaatccacaattattactaatggatgaacccttgagtaatttagacgcaaaattaagaattaaaatgcgtagcgaaattagagaattgcagcaaaagctaaaaatgacagttctttttgttactcatgatcaaagagaatgcttcgctatttccgataaagtattaatcatgaaagatggcaaaattgatcaatatgatactcctgaaaacatctttcaccaccctagttcagaatatgttgctagattcatcggttatgataatttcatcaatgttgatgaaattattaatgatcgccaaattaaaagtaaagatcttgttttcttaactgatgaaaataatattcaagctaaggtattaactattagacccgaaaatattttgattaattcagaagaaaatccgtctaataatttgattgatggaacaatcactagtcttgagtatttaggtcagagctttaaatataaggtaagtactagtctcggagacttcactgttgaagagtctaggaaatcgatgcgtagctcaggagataaagttcagctttatttgccctccaagcatcttcatccgttgtctagataaccaattgtaaagaaaggaataaaaatgaattttaaaaaagttggtttattagctgcaagttttttattagttggttcagttgcatttggtacaactgcatgttcatcacaatcatcttctaacggaggaaatttaactgtttcaacctttggtttatctaccaaacaaatgcggaacgatgttttaaatccttttgctaaacaatcatcagttaaagtaaaaactcaatttggtgatagtgcaacaagacttactcaaattgaacataaccctaatacaggtgttgatgtaattgaacttgctcaaaacaatgctgttactggcgataaaaagaagttatttaagaagttagacttctctaagatttccaatttcaaatatttatcaaaatcagaacaaaaactagctaaagaaactaatacagttccttataccgtaaacagtttgggtattatctataatccaaagaaagttaatattaattcttggaaggacttatggtcatctaaacttaaaaataagattgctgtacctgatatgacaactagaaactgtcaaatcttttgtgtaaatagatctttctcgtaaattgattttttaattatttatttaatcaaagtaggattctaaggtgtcctgaacctgaccaaagcctttatgaattcgattgaaataacggtcattgtagctcattgcctgaatgccaataaaagcatcaagcgactgttcagttggaaactctgccttaggcttagctttgcgcttgatcacattgttaaatgattcaatcatgttagtcgaataaattgaagctctgatctgcttgggatagttataaaagaccagcagatctggttctatgtctttcaagcttctgataacatggctgtaaaccttgccccatttggtatagaagtcatgcaggacagctgtggcttcttctttgtttgtctgttgatgcacctgtttgaattcgttcatgatcttttcacgatcgtcgacgcgtactttagcgcagatattgcgcatgacatgaaccaaacagcgttgaaaatgagctttaggataagtcctggccaaggctgttttcatgccaacaacaccatcagaaagaaaaagctcaacttgctttaagcctcgggatttcatgttttgaagcatatctgtccagacttcaatgttctcgctaggcgcaatgcagtagtcaatgacctccttgtgcccattaggcttgatgccaatggcaatatagactgcttcacgctcaaatgtttctcggcgcaaaggaaggtatgtcgcatccaaatagacgcagaaaaacttgtcgcttagcttgcgtttgtggtaagcctcaacctttggaatcatctgcttggaaatatttgatacctgagctggactgtaatggctgccatacatcttttcaattagatcggctatttccctggtggtcacgcccttggagtaaagcttgataatcatgctttccaagatatccgagtgctgcttgtagccaggcagcgtgtgctgatgaaattgaccgttgcgatcccggggcacttgcacttcaattgggccaaattgcgtatcaactttgcggaaataagcaccatttctagagttgccagtattccagccatttctggcatagggatcatagcccagaaaggcagtcaattcagcttctaacaagttattaacagcctgttgtagctctttgcgcaataaatcatttattttgtctggattgaatagagcttgagcaaaatctttggtaaaatcattcatgaaggagttcttctttctgtatgtgtttttttgttcaaaccaatcatacgagaaaggaactcctttttctaatgtttaaagaaataaatttaaggaatcattcatccttacacaaactattttacagtctcgacaactacttttggccccgcaatgttatatattgctggtgactatgctggtactagtgtaactaaagacaacggaaatgcagcatttaaggcaatgaaagaattaaaacctaatgttgtcaaaacttacacccaaagttcagatttaagtaacatgtttaaatctagtgaaattgaagctgctgtagttggtgattatgctgttggtatgcttcaagcaactaatccaaacttaaaatacatcgttcctaagtctggtacatatgctaactacgataatgtctctattttaaagaatagtaaaaattcagcagctgcatacaaatacatcaactttagattaagcgaaaaaattcaaaagaaagtagcaggtcttaaatctttgaacaacgctcctgtaaacactcaagttaaattaacacctgcagaagcagcaaacaaaacttatggctcagttgctaaaagagcaaaaactattaatttcttctttgtaaattcacatatgtctaactggatttcaagatggaataagattatgaataaataattgatgtttattccctataaggagctgaattgtagattcagctccttatcttttatggaggattttaaatgactgaggtagacttaattatcaaaaatgctcatgtttttaatgtatatttacgaaaatttcaagatgttcaagtaagtattaaaaatggcaaattctattggattaataaagaattacctaatttaaaagcaaaaaaagtcatcgatctacaaggtaaatatttaatccctggttttgtagatgcccatatgcatattgatagctcaatgactacacctaaaataatgggtgaaacaattctaaaatatggcacgactactattattgctgatgatcatgaggttactaatgtcgccggtattaatggattaaaagatttcattaatgaagattcgccaattgatattttcttcggcatcccttcttctgttccttcaaccaatcctcaaatggaaacaactggcggtaaaattggtgtgcctgaagtaaaagaattacttaaagatccacgctttatttgcttaggtgaagtcatgaactttaaagatatgacttctgacaaggacactctaattaaggacataattaatacttgtcataaaactaaacctactatgccaattgaaggccatacccctgcttatcatggtgaagatttagctaaaattttatatgccggtgttactactgatcatactcaacaaactagagatttagtcaatgaaaagataagaaacgggatgtttgttgaagttcaattaaaatccatgcatccagatgtcatcaatactattattgataataaatattttgaacatgtagccttagttactgatgattcaatgcctgatactttgttaaaaggtcacttaaatttattagttaaaaaagcaatcaatatggggatgaagccagaagacgccatttatatttctacctatattcctgcaagacatatgggattatgggatcgtggtgcaattgcaccaggaagagttgctgatttctccattctggataatttagaagaactctcaatagctgatgtctataaaaatggaatatccgcaaaagagactatcaaaaatacttctcaagatgatttttcacctaatagtctaactactagtgtgaaagctcctaaattaactaaacaagacctattacttaaaacaaatcttgttgataatggctcagttacagcaaatgtcattcaaataaatcctgtcggtacttttacaaatcatattcaaaaaaggctagctgtacataatcatatcgttgattggcaaagtgcaaatttagctttaattattgtccaagaaagatatggtttaaatgatggtaaatttagcttaggcctagttgatcgtggcattattggtgatggtgctgtaggggcaacctgggctcacgatcaccataatttgatggtaatgggaacaaatatagatggcatgattgacattcaacatcaattaattaatcagcaaggtggttatatagtcgccagaggtgaaaagattgcagccaatgctcctcttccaattggtggagttgtaagcaatcaaccaatgaagattttaggagaacaaattggtaatatacgtaaaaatctcgtagaattgggctataaaaatacaaacgaaattatgtctttctctactttgtctttacttgtttctcctagtctaaaaatctctgataaaggtctttttgaagttaaatcacaaaagaaagtgcctttatttgaaaaataattttcttatgaattaacatattttctatttcgccgattgtaaaatcaaattgaacactttagaaaaataaaaagtccatttggacctgtttgataaaatgtaattaccacaaaacattcagaaacgaggtcacaaatggactctttacattctatcatgcctaagcacgaaaagggaaagtatttatcactagaagagcgagttattatttaaactcgtatcaaggatggcttctctcttagagctattgcccgtgaaattggctgttctccttctacgatcagttatgaagttaagcgtggcacagttttgctttataatggcaagcaaaagcgatataaagcaaaacatggtaatgaagtttaccacttggatcgtcaccgctgcggtcgcaagtcagatttcttaaagaagaatgactttattaagtatgtcattaagcacttctttgaaaataattggtcgcttgatgtatgcgccaatcgctgtctggctataggaaaatttagcagcgaataaacagtctgtactagaacgttgtataactatgtagaccaaggcttgttggctatcagaaactctgatttacccgaaaaattaaagcgtaacattaaaattcatcgtgtccgtaaaaacaaaaagaaactaggtcgaagcattgaagagcgccctaaagtgatttaagaccgaaaagagtttggccactgggaatgtgacctagtcttaggacataagactagagacgatcaagtgctgctaactttgtctgaacgaatgagtcgagagttcttgatcatacgtattccggataaaacggctaacagtgtaatgtcagcttttcaatccttgcacagtcaatatagaaacactggaatgaaatttttaaaacgattacaactgacaatggctcagagtttgcggatctatccaacttagagaaagtatctaacactttagtctattacgctcatccgtatacttcttgtgataaaggcactgttgaaagacacaatggccttattcgcagattcattcctaaaggtgactacatcaataactattctcttcaagaaatcattgatattgaaacctggtgtaattcattgccaagaaaactattggcatatcacacaccagatgaaatctttgaaagagaattagacaaaatctatcaagcagcttaagtgttcaatttattattgcaatttacgctaatttcttatccttgtaagcgtagctgataaagtagttgccagcaccgccgccgacacgcaaagcattaactttcttacccttaacggtcttcttcataggagcatagtagtagccgtcgccgctaccagcaagccagccgtttgcgttgaaatccgtaataccgtggaatttaaaggtataagcttcaaattgtgagctagaaactttgtcagctaatttgtagttagccttttcatcggcagcagttaactttttatcccacttatctgcttctttaccctttaataccttataaaccttgaggccgttaatagtatgtgcagtaattttagttctaataactttaccagcttctttgtgttaccaaacaccacgcgtattcttaggtgtggtgaaaagtttggtagcaccctaactagcagcatttgctgtgtttgcatgaacgctagccaaacctaaaacaactaaaaaagcggcaataaatgataaaacttttttcttcattttttatatctccctttcaaatttatacgtcaattatgccacggaaaattctaatgggagctaaaaatagagcaatttttgccctatttttaaacatgaagatcgttattatttacccaagctgcagacacaaactttacagcgttcctaccacagaacaatgcataagtagaagttattccttgaaatttttgtgggcaagaatcacttttcagggatgaatgaatttattagcaactaaaatcaataaaaagataaagtcccatttttctttacatatttatcagctaaattaaatactagcaatccaataatcaaccataatacggtattaaagatagattcgcttaaataaaacgctaaattgtatggtcgattgttaactgctaatctcatccaactaaccattggacaaattggcaataaacaagataagcattttgtaagattggagtagttttcaaaattaactagtagtatacctaagtaaatatattgaaaaatcactaaggtactgccaattcttttaaaacgtaaaactaagctaacaattaaatagcctaatcccactgtagttagtaaagctaatataaatggaacaatcattattactggaaaactaatccagtgatcagaaattgccattactgctatcagaattaaaattgcttggacgaatgccacaacaatatttgcaatacttttatttaaaaataatcttctagaagaaattggcataagatattgttgttctaaaataccacttttggcattattcatcactgttgatcccatttgggtaagtgtcaatgtttttgcggtagcctttaaaccattagtctaaccttaatttcttaaatatttatatgacttaaatttctgcttagcttgcttaaataactattgccagctacctgtgcggttaatgcgccatgctggatgcctaaatgaacttcatgacgcttctttaagctgtcacgggccgctgcttttaattcctgttcagtcaatacagttatttctgaatcttcaaactcgctgctaagccaaaattccagctctcgattcttgatgcagcttaagatcctaagcatgccttctgctccagattttgaccatttcttgccttgccccttaacacggtaggtatacttgcggtggttgctctcgcagcagccaatggctttagtcacagtcagttttcatttcttaaacggcttaatatcgtcccaatgacgatcaatataattccttaggcgccccagataatcatgattgagctcggtattcaattcatcaattagtcggctttctgcagtggttaggatagttttaactttgtcatagctgtatttgtattccaaagcagaaatcagcttgccttgcaggtcaggcgcaaaatatagcctttctttgattttcttatttaggtgaaagacatccaagaaatgctcatgacgcttgcatagccctacaatgtcatcgaagtctgttttggcatatccagcaccgccatcggcgttgctaagaattacagtatcagaaagatcataagtattggccaggtactccttggcttcgttcagcgcatcaagtcggcttaaagaaacaaattccttggcattgattcgctttctgcgtttcttgcttatattgacaatgccttcacagacctgatagcgatgaaattccaaccggcttttagtgcctttgatcaccacgccatcgccttcaagatacaaaactgggacctttttcttagtgcctgcggcatcatatcttgaatctgcttcttggcccgctttaatatttttcccggccatttttaccaaattgcccacctgcatatggctaatattaaagccagacaggcaattgactgctagagcagtattgcgataagtggcaacgctgcttacttctaagatgtttttgactgctaaaatactgtagcgcttgtatttgtcaaagcccattaattcatccaagggataccttgcttgtttgcctgggcagacatatcttcttctgacatacctaacttcgccaaaagccatattgattgagcgctcattcttcttatcaatctgatagccctgtgctttaaccttggtaatcatttcatcatcaactttagctaaagccaaggccatgatttccttaatcaggtttaagaagaaacagattatttttctttcacgcttaatataattatcttcagactttataatatttgcgatttcagttacaattgaattcataaaagaccagcttctaatgtgttttttgttcttaacatcagactactggtctttttgtttgagctcaagtccaaattcaaaggacttgggcttttttaattatttattcaacttaccgtaaaaaattatacacttagcccatttggctaatagtgttttcaattaaactccacaaaacatagccaactactagggcattcaatgattttcctaaaacgccacctcctacaaggctaccgccccaaaaaatagccataaacattaaaattaataagaaaaattctgaaatataattgaagaggtatctcttatataaatagaattgacgccaaaattcagctttaaaacttatcatttttccttctccgtgtagtacttaaaaatttcatctaatcctctagtcacagtttgtatactacttattggtaattcactcaataatttaagtacttgtgaaagagatgcttgcggtttaacacccaaacgataaactccgtcagtcttctttgtaagttcacagcttgcaagtatatcctctttttctgaggcggtaagttcttgggtgaaatgcacttcaaaaatttcttgtttattcagcttcttcaaactatcttttatactattagaaaagacaagtttaccatgattgattaataaaattttattagctatctcttgagcaaattccatttgatgtgtagtaactagaatccctactccattggcggataacatattcagactcttaatcattatttgagtagcattaagatccaaacctaaagttggctcatctaaaattaaaagctttggttcggcaatcatagcacagcaaattcccacaacttgctgcatacctctactcaatctggtaatagaggtgtatttcttatccaacagaccaaactgtttgaggaaagtttctcctcttttttctgcctctttcttgcttaaaccacgttggccaccccaataaacaaaattttccattggtgataaggcccaatacatatttctagatccttctaataaaacgccagtgtttttcaataaaaagagattgttgtgagttacatcttttccgtcgaatacaaccgttcctttatcaggactaactaaattaagaatcatttttaatgttgtagtttttcctgcaccattaggacctaagaaggcaacaatatcaccactatcaacattaaatgaaacatcagataccgcctttttatgtgctttttgatatgtttttgaaatattatttacagataataaagtcatgcaagggtacctctttcattttttaattatggtattctatttttcctttaactttgcatttattcgtctaacagtgttccataaatgtaaaaaatatccaccgtatgcaatagcgtacataataataaaatcaactgttactctaataaccatctttagtgaaatactaaaattatcaattaggaggtttaacaagaaccaggcaacaaaacagacgaagaaattaataaaaatttgttttttcaatgaccatttttcactattaaaaatccagctagctagataaaagaaaataccaatgagaaaagaaataatcgtccaaaaaagaaaggttttcaaatatatcttcgctgttgcaggattttgaccatttagtgaaaacaagaagtccatagccatccagatcgtaccgataccaataccaatcagtccactaatcagaccgttatataaaagatctttaatatttttcataatcctagcctctcttttaaatcctttattcttctacgagaaacttgtactcttagtccattctccaaaagcgcatcaatattgcctgtatttataatttctagatgatcaataaaatgataattaacaatagcacctctagaaatcattataaaatcgttaggtagaacactttgtacttgatacaatctgcccctataaacatatttttgattttgagtacaaatcattgttttttcattttctatttgaattgcatagatttgagaaaaattaatttcataggcatccccatctagatagcaccaaagaaaatcctgctccgaattcaactctttagtaatccgttcaaatctagcagtcattttctttaaccaaaattcagctttttcttctggtaaacttggatcgatattcaatttaactttcaattgcatccctccttgattgattattagtatacctgcttattttcgttaaattattaaattcaggtgaatggtctaaatttaacggtgagtggtatttttttgcatcaaaaaagctgctagaccacggtaaatctaacagctctatattttcggaatcaatcctaattattttgccttgtaagcagtttctttactggtggtaaatttgtgacccttagcaatataaacctttaaagtaggagtaaagtccaaaactgagtcattaaaagtgtattgttgcatgatgtcagcatcagctgaaacagtagttgatgtttctgccataccaacaacgggtgcggctgcgaacattgcagccacaaaaatagcagctaatttgaaacgtttcttcatatcatattccgccaaataaataataaaaatttaacgatttttttgaatatatagcaacttagaccaaattaaaataacggatttttattatagttcaataatttagatatcattgtcatatagaattagctacaaatcaatagataacaagcaaaaaataaaaaacgactcataactactagctaatttatagcagttatgaggtactttatcgtgcgtctcattttctgtttttaatttcataattatcaacactttttacttagtagcaatccaaccttcgttttctaacattgttttagcatcttcaattgctaatttgtgttctgcaaaatgtacgttgcttaattctactttgttatttaaaacatctaacatatatatcacctttcgattctaattctttattgcctctatccctctcggcatctttataataacactgtttattataaagcgaagtatctaatcgttgatataacagcatttgtgcattaatatacagatataatgagaccgtaaaatagtttgtgtaaggatgaatgattccttaaatttatttctttaaacattagaaaaaggagttcctttctcgtatgattggtttgaacaaaaaacacatacggaaagaagaactccttcatgaatgattttaccaaaaatatggcacaagctctattcaatcaagacaaaataaacgatttattgcgcaaagaactccagcaagcagttaatgacttattggaagctgaactgactgcgtttttaggctatgatccttatgccagagctggctggaatacaggcaattcacgcaatggtgcttatttccgtaaagttgatacgcaatttggcgagattgaaattcaggtgcctagggaccgcaacggcatgtttcatcagcacacgctgcctgactacaggcagcactccgatgtcttggaaagcatgattatcaagctatattccaaaggcgtaaccaccagagaaatagccgatttaattgaaaagatgtacggcagtcactacagcccagctcaggtatctaacatctccaagcagatgattccaaaagttgaagcctatcatcaacgcaagcttagcgataagttcttctgtatttatttggacgcaacttacattactttgcgtcgcataacctttgatcgtgaagcagtttatattgccattggcatcaagcctaatggccacaaggaagtcatcgattaaccgcattgctcccagcgaaaacgtcgagaattggacggaaatgcttcaagacatgaagtctcgcggtctagaacaggttgagctctttctttcagatggcgttgtgggcatgaagacggtactggaaaagacatatcccaaagctcattttcaacgctgtctggtacatgtcatgcgcaatatctgcgctaaagtacgcgtagatgatcgcgaaaatatcatgaatgaattcaagcaaatccatcaacagccaaataaagaagctgcgatcaaagtcttgcacgccttctatgacaagtggaacagagcgtacaaccatgtcatcagaaatctcaaagagattgaacctgatctgctggtcttttacagctatcctaagcagatcagggtttcaatttactccaccaatatgatcgaatcctttaacaacgttatcaagcgtaaagctaaacctaaagcagagttttcaaatgaacagtcgcttgatacttttattggcattcaagcaatgagctacaacgaacgctatttcaatcgaatccacaaaggctttggtcaggttcaggataccttagaattctactttgattaaataaaagattaaaaaatcaatctacgagaaaaatctatttacacaaaaaatttgacagtttcttctaatttttaatattttcttgaacaaattccactaaattaatatttggatatttatcttttatttgtcttactaaggcgttttttctcttcttagatagcggcttttttaactctatcaaagtaatttgcttatttttattatcactaactgcagtaacagaagatattgcagatgacagtttgcgaattttttgattacgtttttcttgttcttgttgacgtttttcatcagcttgttcttgttcatgctgacgctgattaataatattatttacttgtcgatctaattgattttctgcattgggattaacctgagctacttgtacaatattcagtgaatagcctttcaggtcatattttgttaagtttgctttagccgcttgaattttcttagcgttaattttatcgcctgaaactgtaagattaattatttttccttgcgtatcaacattttccttaattaaattaacattgcctaattcattaacaacaagattttgaacattttgatctactagagttttattcaccatctgattagctgacaagatactaggaataattaaaataattactactaaaattatcacaaactctttaaaggtcggcttgtgcaagaaaaacaacttagattgcttagtagaataacttaaccacttcataatttttacacccatgaatgcagtcaaaattatgaaaacacagttaatcaaaaataaatagcttgatcctaaaaaatatttaagattacctgccgcaattgaataccctatcgtacaagccggtggcattaaggctgttgcaatcgctacaccaggtacaatattatttgcttcttttttgcgagctccgattattccagcgacccctccaaaaaacgcaatcatcgcatcccagattgttggtgaagttcgtgcaataatctcttgactagcataagtcaaaggagaaaaatgaaaataaattgtagatgcagctaaactgataataatttctgctaataatgaaattgttcctttacgcagtaagtgaacatcatataaagcaagacctgtgccaattgctagtagtggtcccatcagaggagaaatcaacattgcgccaataatagtagctgttgaattaacatttagtccaatacttgcaataaaaattgcacaagtcaggacaattaaattttcaatatttaaagtcccatcggcactaatcttagataaaaattgagaagttaaataattttttcgctggcgtattatcatcttatttagtctaatccttatgaaaaaagcactgaattaagatttcagtgcaaaaatataaaaatgtagttgaacacatcaataaaattattataacttatttgatcctgaattgtcaaattaagtgcaacagttaggctatgaaggaacgtattgcttgaagagttcttctgctgtgtgatattggaggattcgacgatgtttgcggttaatggcatcagttgcctgttgaacataagcagctgacttatctttcatgcttttgcccttagggaagaattgacgcagaagtccattgcagttctcatttgtgcctctttcccaaggagaatatggatgagcaaagtagatctgacatcctttgattttggtcatatccgcaaactcagaaccattgtcaaacgtaattgatttaaaccaattaggatgtctgtcaatctccttttgaagcagtctttgacaagtactggcccgatagtcaggaattttgataacaacctcaaaacgagtggttctttcagtcagtgtcattaaggcaggttgatttttacgtctgacgcctttaaccaaatcgccttcccagtgcaggggaacttttctgttttcaacttctttaggccgctgttcaatcgaattgccaagattctttttatgcggagcatggccaccatgactatgatggcgtttgtttctgcgtcttttaagcttcattggcaggtcgatattgcttatatccagcaatccttgatcaatataacgatagacagtgggcgtgctaggacatggataatttggcataatcctgtgaaattcaccaacgaattcatcaatgctagtggcatcaaatttggctttaaagcgtctgcttagcattctgaaaaaaacggcatagtgttgcagtggattacacttatagcagtttctgcggcgcttttcatgataaatttgtgcagtatcagcgtaatagtgctcatacaagacatagctgctgtctctttgcaggacactgcctcgtctaatttcacggctgatagttgatttatgacagcctacttcttgagcgatagcagtgcaggaggttatgccagaatcaagcagagcttgaatttgtccacgttgttcgctgttcaattgatgataatgcttggaaatgctagaatttgagttggtcatgaagatcttcctttcttgatttttggtcacttcaagtttaggtcttcatggcctttttgtttaacaattagtgttgcacttcaattttaaatccgggtaacttatttgattaattttttgctcttataacaataatataaaaatgaattatctgctccatttcctactcgcagtgcgaaactgtcaaatcttttgtgtaaatagatctttctcgtaaattgattttttaattatttatttaatcaaagtaggattctaaggtgtcctgaacctgaccaaagcctttatgaattcggttgaaatagcggtcattgtagctcattgcctggatgccaataaatacatcaagcgactgttcagttggaaattctgccttaggcttagctttacgcttgatgacgttgttaaaggattcaatcatgttggttgaataaattgaagctctgatttgtttgggataattgtagaagaccagcagatcgggctcaatttccctcaaacttttgataacatggctataagctttattccattttgcataaaattcatgcaagacagctgcagcttctttttggcttgtctgttgatgtatctgcttgaattcgttcatgatcttttcgcggtcatccacccagactttagcacagatattgcgcatgacatgaaccaggcagcgttgaaaatgagctttaggataagtcctggtcaaggccgctttcatgccaacaacaccatcagaaagaaagagctcaacttgcttcaagcctctggacttcatgttttgaagcatctctgtccagacttcaatgttctcactaggcgcaatgcagtagtcaatgacttctttatgtccattaggtttaatgccaatggcaatatagactgcttcacgctcaaacgtttctcggcgcaaaggaaggtatgtcgcatccaaatagacacagaaaaacttgtcgcttagcttgcgcttgtgataagcctcaaccttggggagcatctgcttggaaatatttgatacttgggctggactataatgactgccatacattttctcaatcaagtcagcgatttctctggtagttacgcctttggagtagagcttgataatcgtgctttccaaaacatcagagtgctgcttgtagtcaggcagcgtgtgctgatgaaactggctgttgcgatctcgaggcacttgcacttcaattggtccaaactgggtatcaaccttgcggaaataagcaccatttctagaattgccagtattccagccatttctggcatagggatcatagcccagaaaggcagtcaattcagcttctagcaagttattaacagcctgttgtagctctttgcgcaataaatcgtttattttgtctggattgaatagagcttgtgctatatttttggtaaaatcattcatgaaggagttcttctttctgtatgtgtttttttgttcaaaccaatcatacgagaaaggaacccctttttctaatgtttaaagaaataaatttaaggaattattcatccttacacaaactattttacagtctccgcagtgcatctactttatcattattacttttatcttttttctttatagcaacataagtgtgtcctgaatcagctctatcactagaaagccaaccattggcagcaaaacctgctgttttataaaatttaaaatcagtagcttcgtattgagaggtaccaactttttgagctaatttataccccgactttttatcagttttagctaattttttagtccacttaatcgcttgattactgctcaacattttatataatttgattttattaaatgtatgcgttgtaattttaagcttctttattttgccttcttgcttatagtaccatgttccgcgagtttcctttggtgtagtaaataaattcttagctccccaggatgcagcatctactctattttgacccattacaataatagctaacatgaatagcgcagttgtcataaatataatgagcttatttttcaagtttatcacctttccttatataactcctattttcattatttcattaaaatatttcataaaagttaaaggggatgacagttcttttacttcttacttacaaacgtaaaaaatcaattacattagctttaccaaaaaaacgtatgcaataaagccatcttaattagacctggcatagcatacgtttttttattttattttttaattatattaattaattttctcttgagtatgacttaacatctgcatcaatttcattaataaaatcagtaaggctcttagaaatttcttcgtcagtaccgtaacgacgtacgtttacgctaccgttcttcatttcttcgtcgcctaacaccaaagtgtaaggtaccttttgggtttgtgattcacgaatcttgtaacccatcttttcgttacgagtatcaacttctgctctgaagccacgcttagcaagttcttgacgaaccttttctgcatattcaccatgagcatcaaggttaactgggataattttaacttgaactggagcaagccaagttgggaatgcacccttgtaaatttcagtaaggtaagcaatgaatctttccatagtaccaacaataccacggtgaatcataactggacggtgttcttcaccatcttgaccaacgtaagttaagccaaatctttctggaagcatgaagtcaagttggatagttgacatagtttcgtcattacccaaagcagtcttagtttgaatatcaagcttaggaccgtagaatgctgcttcaccttcagcttcaacatagtcaaggccaaggtcatccatagcacccttaagcatcttttgacttctttcccacatttcgtcatttgcaaagtacttgtcagtattctttggatcacggtatgaaagtctgaagtagtaatcagtaatatcgaagtccttgtatacgtccatgattaacttcaaaatcttagcgaattcagtttgaacttgatccaaggcaacaaaagtgtggccatcattcaaagtcatttcacgtacacgttgaaggcctgacaaagcgcctgacttttcatatctgtgcatcataccaagttcagcaacacgaagtggcaagtcacggtatgaacgaatgtggtgcttataaatttgaatatgtgaaggacagttcattggacgaagttcaagcatttcgccatcacccatgtccattggtgggaacatgtcatcacggtagtgtgcccagtgacctgaagtcttgtaagcatcaaggttcattaatactggagtataaacgtgttgataaccgtcagcaacttcacggtcgataatgtaacgttcaacaacacgacgaatagtagcaccctttggcatccagtaaggaagaccagcaccaaccttaggatcaacgaagaagaagtcaaggtcacgaccgatagttctgtggtcgcgttccttaatttctgcacgacgcttcaaatcttcctttaaagcagcttccttgaagaaagcagtaccgaagattctttgaagcattgggttggatgatttaccaagccagtaagcaccagcaactgacaaaagcttgaagtgcttaatcttaccagtgtttggcaataaagcatcaaagccaaagtcaacgaaatcacctaacttgtaagcatcaaccttgtcagcatcaattttcttcaaaagatcagtcttgtaagggtcatccttgaaaatatcttcaagttctgacttgtccattacaacatgttcaattgcttgaccactcttaactaatttttccatagccttttcaagttctggcaattcagtaaccttaatttggtcatctttgtcagtatctacgtaaaagccgccttcatcagcaacatgttgacccaaacgaagttctgggtacttgttcttagcaactgcttcaagtgcaaaagcagcagtagctcttaaaatgtctaagccttcttcatccttgtcagtaagaatagcaacttcaacatcattgtcaatttcataatcaagtggcttaacaacgccatttactttagcaccaacggcagcttttccaagagatgtagcgattgatgaagctacttccttaactgaaacagccttatcaaaatctttctttgaaccgtctggcaaagtaattgaaaaactcatatttttacctccaataaaaaaatcccagtgctaataaaagcactgggacgtgttaattgcgtggttccacccaaaattcaggttagcgtacgtctaacctctcgtatagattgataaaggtatccagcctcttaaaattcaattttgggaataaacaattggggtgattttctaatgaagaacttccagaactaggtccttctctctgagccgaacatcatcatgtctcgtttaattaacttcaattatacgcatcaaagtgaacgatgcaagaactttttgaaattaatgcgaaaaatttcgtcgatcgggaccggaaactactacttctttagctaaaaaacgtactcgttgcattaatcttttagctttaactggatcagttgcattacgggtttcctcaaagtgtgactctaatgcttccatatctaaattagaagagaaaaaggttggcaaaacattatccattcttgcctgtaaaattactcctaaaacgtcatcacgtgaccactgacttaatgtttctgccccaatgtcatccaaaattaagacatcgcattcagctaaattcctgatctcatcttgcaagctgttatcaccaaaatgacttgataaacctgcaataaaagttggaacatgtaaaaatacaacattccgatcaaaattagttgctacatagtttgcaagtcccgctagcatataggtcttcccgatcccaaagtcgcccgacaaataaaggccttgttggtgaggatcagctttgtactttttcaaaaaatcataaatcagggttaaagcttgctggcgatcatttgtaacctcaatatcacttaaattaacatcatgcaatttagcaggcagatcaattaaatgaagacgccgcttggctgctcgttgctgatctgctacaatcttagcctcggtaggtttataacgtacatcaattactttgccgtttaaaaataattgcggagcataaccggccagcacctgattctgactatgtttttgcgcataatattcatagatattggccatactatttcgaatcatcgccttatctattttttccctatttgcctgcaaaaacgcttgcacatctggatcgtgtaaagcagttttcaacagttctttctcattacctaaattacgctctttaactatttttttaagcaaatcaccaattgcttccattatttcacctaccctctatttacttatttttcagatccttaaagatatccttcagctgttctgttgacataccttcatttttagcctttttcttgctccaatcggtacctttttcgactcgcttattttgtcgatatgactgtcgatttttctttttaagaatatcggctttacgcttcttcacatattcaagagcttgtaccccagtactaataccaccttgcagccaatcattagctattcgataagcacgattagaagttacaacagtatcgtaggtcaaacaggtatgaatcaaaatattaatcaaatcttccggcaagccatactgcgtgtgcagctgattaataatatagttttcgcctggagctacaattccacccttttcagtttttaatttgtataaaaattcagatggggaattttcattagcttcgagtaacagttttctatcattagcatccaaacctttgatagtcgcaatagcgcgctttttgccttcttcaatttgtttttgaatgttttccctagtatgcaatcgtttataattttctgctatggtattactaatttcatgcatgtttaatttatgtgtaccatgcaaacagggaacagtctcatccacaaattcctgttccgataaattatatgtctgtattaagccccgaatttggttctttttaatttctacttcttgagctggaatttgatagacattatattgatctttaatcagatcccaatcaattggatcctgggcattaatttcagcagtttctatctcaggcgctttattttcctgcgcagcttctactacctcattagatggattaattgcttcatcccctggcaagcgaaaaacatcaaaaaagttggctgagacatcgcgcgcattcttgattggcttttcacgcagttttgcttccttagcaaaagcatgactcaagtcatgaaaggttgggctgccaactttttctttcaacaaacttgctagcagtggtgttgcaaaaaatttgtctgcactaggaacctgtaataacttaaaaacaatgatattattgaagacattatccgctaaaaaagtttgcactaaacctacggcttccagtttatgcaaagaatgaaacatatcttttaaactacaatcaagttgctcctgtagtgaataaattccctttgaatcagaaacaataccatatggatcatagtcattgatcaaagtctgatacaaggcaattgccaccgcgccaaccaaaggctgatacagtttaatcaagattttctcattctctggaaaaagggtaatcttgttggctacataataaagatgcttaggatcagacgttgcgaacatgactaattaccctttccttttttggccatcatatcttccattgtcttcataaagctagacatatccttgaactcacggtaaattgaagcaaagcgaatataagctacgtcatccaaattagccaaatcatccatgacatactgaccaatcttcttagatgaaatttcactaacgccttgttttcttatcttattttcgacacgatcaaccaattgctcaaattgttcactactgattggccgtttttgtccggctgccattactccgtgcaaaattttctttcgactgaatggttcacgagtaccatcattttttactaccaacaaaggagcagtttccactcgttcaaaagtagtaaagcgaaaaccacaattttcacattctctgcgccgtctaatagcccggttttcatcactaggccgcgaatcaataacgcgagaagcattttgatgacaatttggacattccatagctatccctcttctctaatctttaccaataattgtgctagtttattctctagttcttttattgtaccagtattttcaatcacaaaatcagccaattgctcttttttgaccataggcaactgactttgcatccgaattcttgcttcttcatcggttaaatgattccgctccttcaaacgctgtaattgcattttctcaggcaaagtaatcactaaaacaccgtcagctatatctttcttatccatccctgactcaaaataaagtgggacatcaagaataactattggttgagcttgatattgatttagcaatttctttgtttgcaaaaaaatcaacggatgcgttaactcatttaatttagttaaagcccgcgaatccttaaataccaattgccctaatttctttcgattaatcgtttggtcatcatttaaatactctgagccaaaataatctttaatcgcctgccaagaagcttgcccaggctccatcaaatcatgagcaatctgatcatcatcgatcacaggaattttatttgctttaaaaaactggtccgctgtacttttcccagttgcaataccaccagttaaggctaaaacatagctcattaataaaccacctgacaatgtggacagaaggttgtccctctgcctgatactttaatcttttctagttccgtgccacactttgcacaaggttcacctgcatgaccataaaccttgagcatttcttgatagccaccaacatttccgttggcatctaaataagtatgaacagtcgtcccacgcttttttgttgcaattttaatagtttggttaatattctgccacagctcttttgctttttctgctggaattttatttgcggcactcaaaggatgaattccactctgccacagtgtctcatcaacatagatattacctaaacctgcaacggttgtttgatcaagcaagacatttttaatatttttcttcttacggctcaaggccttgataaaataatctgacgaaaattctatgctattaggctcagggcccagtttgccaatccccgtcacttggcgctcagtacctgttaaaatcagctgcatgcggccaaacttacgcacgtcattataacgcaaggcagtttgatcagtaaaaataaactctacgtggtcatgcttatccttaggcgcatcgggagtggttaaatgatattttccctccatgcgtaaatgtgacacaatagttaaattatcacttaggcgtatcagtaaatatttagcatagcgatcaatctttaagacccttttacctggtagttctttgataaatttcttatggtctgttgccacaattttgggataccaaagtactacttttttaatcgtttttccaacgattagcggagttaaagtccgtcgcaccgtctcgacttcaggcatttctggcattaaatcacctactttgcatcataccaattatgaccccaaccagaatctgcaatcaatggcacatcaagcttcactgctgattgcataacttctggaactatcttcttaatcgtttctaattcatcttttggcacatcaaaaatcaattcgtcatgtacttgaacgaccatcttggtcttcaaatgtagttcatctagcttcttttgcatattgatcatagcaatcttgataatatcggccgctgatccttgaataggcgagttaatcgcagttctttcagcaaaagaacgaactgtaaatttcttagcatgaatatcaggcaagtagcgtcttctgtgcataattgtttctgcatagcccttttcacgagccgtttgcacagccttatccatatattcacgaatttgtggatattgttcaaagtaattgtcaataaactcttgagcacgttttctagaaatacctaaattctttgataaaccataatcagaaataccataaacaataccgaagttaacggctttagcatgacgcctcatcaatggcgttacttcatccggtgaatctaaatgaaaaattctcattgctgtatgtgagtgaatatcatagcctgtcttaaaggcttcttgcatattctgatcaccggaaacatgtgctaatacccgcaactcaacttgggaataatcacaagagaagatgtaaccatcaggattggttggcacaaaggcttttctgatttgctttccttcttcagttcgtgtaggaatattctgcaagttaggatcaacactagaaagtcgaccagttgctgtcaatgtctgtagataacgcgtatgtacgcgaccatctggctgaatcacatcaagcaagcccttgacataagttgattgaatcttagcaatttgccgataatctaaaatttcactaacaatcggactttgtgtctttaattggtctaatacctcaacagaagtggaataaccggtcttggtctttttaattactggtaaattcaatttttcaaacaaaatatgacctaattgcttaggtgaattcaagttaaagcgctcgcctgcttgttgatagatcttatcctccagctcttttaaccgaacagcaaattcattttgcagttcgagcagagtacttgcctccactttcattccgttgatttccatccgggctaatacacgagcagtcggaatttcgattgtatcaaacaagtcatcttgttcgtgttccttaagcttctcaagtagtggctgcttcaagttttcgatagcattaacctttgaagccaaatgattaaatagttcttcatcgtcatcaggaacatgctcacttttgccttttccatagatttctatatcggttttaactgaataatcaccatacaagtgagcaatttcacctagatcattggaattattttcattattgatcaaatatgaagctaacaacatatcataatcttgaccgtgaacatggatacctaatcgatgtaagccaaccattgtccgctttaaatcaaagacatttttcttaatttgctcatcttctaataaatgtcgcaaattagtctcttgtaaaagttcaacatctcgtgaaacgtaaatttgataattgatttttaaagcaaaaccgacaaatggagcaaggtgatagttagcacctagcatagcaagataaaattcaatttggtcatctgcattagctttgattttcttgacattttggtcatcaagaactgtgtattcaactttttctacttcagttgcatcttggccttgaccgctagcattcagttctgccaagaacttacggaaattcatcttttcatagaattggcgtaatttttcataatcaattggttggcgcttaacgtcatcaatatcaattgtcacgggagaatgacgatcaattgtagccagttttttgcctaaaatagcattgtgtttatcgcgaatcaaacgttcttttcgtttagaagctttcaagtcatcaatatgatcatacagattttcaactgtatgatatttttggatcaagttagaagctgttttaggaccaatcccctcaacgcctggataattatccgatgaatctcccattaaagccttcatatcaatgaattcagttggcgttacaccatttacttccttcatatgttcaggagtataagcctcaagctgtgatacacctgacttagtcacttcaaccgttgtcttgtctgaagccaactgcgtcaagtcacggtctcctgttacaattgtagtaataaaaccattttcttcgcccttagtagcaaaagtaccaataatatcatcggcttcataatcttttaattcataagtcttaataccaagatcatgtagcatctcttgaatatacggcatttgttctaacaactcttctggcgtcttagcccgaccacccttgtagtcaccgtacattttagttctaaaagttactttgcccacatcaaaagccaccaacacatgagtcggatcgacatcttttaagagtacatcgagcatatttttaaaagcataaatggcattagtatgcaaaccatctgggctcttgaatgattctagttggcggtaaagtgcatagaaggctctaaaagctacggagttaccatcgattagaagtaattttttatcagccattttatctcccttttaacaaatagatctattcttttacttatctattttaccagttttcatactaatctttcagcatgttgttttagtaaaatagtgaatctctgttaattacgatttttactcaaaaatttaattaaattctttgtcaaaaaaggattttatcaatcagtaatcaaaacaaaaaagcacgtaagtgcttttccatattattcagcgtcatcctgactgccagattcatcccatactttctttaaagctggaacctttcctaaatctgtcatctcatcttttccaacaacaatcaagttgttcggaccttgtgctaattgattgaagctgtctaagctttgatttctgaagtagccttccccagctttagctaaagcatcctgcatcttttatacacggtatgcatcagcatcggcttgtgttttaacagcttcagcgttagctttagcagttgcaaccaaagcatcattcttggccttagtggtcatttcaatcgttcttgcttcaccttcagctttggcaatagcagcggtcttctcacgatcagcagtcaattgtttgtccattgctctttgaatttctggacttggtaaaagttcatcaacgtttactctgacaaccttaattccgtaaatatcagttagatctccagttgctgtaaacaattgatcattgatttccttagttgaacctaaagccgcattcaaatccattcgaccaatgatgtcacgcaagtgaccacgaattaattgcaccattgactcaactgaatcggtgttgttgtagaagtagcggtatgaatcagtaactaagtagttcagagtcaaggaagtagtaatctctgcattatccttagtaataattgaatactttgaaatttctaatggctgcaatgccaatggaactttccgaattcgttgaaataatggccaaacaaagacaaagccagccttaacagttttagaatatttacccaacgtttcaactaagccttcattattttggggtacaattctaaaaccacaacaaatatatgcaataactaaaactaaaacgattagcgtaataacaatacccatttttatacctcaactaaaaattactcgtccttcttcttgggatcgactcccttggctaattcacctagtgaactatcggtctgctctgccaagcggttaagcttttcatcaagtagatgagcatactcatacttgttcatgtagtccaagttggcccaagcattaggaatctcaactctaaaaggaataccattacgtaaaataatttgatcataaaacatattaattgcagtagctgaattcaaacctaattgctttaaaattgcttctgctttttctttcttttcaggattcattctgacataaagtccagttgttttctcagccatggtaccctctcctttctatttaccactattatatatcgtttgcatataaattgcatagcttttttacaaaaataaaaagactaccttttgcagtagtctcaagaatctaattttagcctaaatcactaatgtggaaaatttgattctccaaagttcttaacttaaactcgccatctttgacatatttttggtggtaagccacagttagataaatgtcatctggcgcctgaacatgaatactttctacttcactgtagcgatcaggcaaatcaataccatcaatcattgctacttgccagttctctggattagtttcaccccatggaaacttaacgatcttacgtgaccaagtagtaacttcaccattcgcatgatcaatcttgggtgacaattggttagaaatataaatattcttgtcatcatcaatggcgtagccctgaacagaatcaatcatttgtggagcttcttcacttggtgccacgcttggatgatcaaagttatcaatgtgaaaagcactaaggcaatgcaaatcagtaattggcgtgttcttagtgccattttcattcaacttttggtttacttcatttaagtcaaacaaaccaaagtgacctgaaccatcatcccaaattgaagcaatcatgaagtacttgccatttggtgaaactgaagcttctactctgtgcaagtgatcatgaccatcataaggaacgtcggttacgtgattcaagtgtgacaaacgtggaagttgtgtatttgaagtatatctttctggtaaaagtcttgggtactttactcgtgcaatttgagtagtccagttgcctgaatttggtttagcacctacgaaatattcatccttgtcattagctgctacccaggtttgcgtgtggccaaagcccatcattactaagtgtggatcagtataatcgatgttcttagttaaaccttcatgttttctataaaccaacacatcatgtgcactgtgaagaagttgcaaggcaaaaacatgatcaccatttactacaccaacttgggctacaacatggtgcatcccattcaagcgataaaacaaatgaggtgtaatacttttaaccattcttatttatcttctttctttatatctattcattttcacttatacataaattatatcctatcatacgcgtggtgctagttaaatcgttctagacaataagccaaattataagctaaaattgcaatttccaaccggctttgaaagcctatcagactacgtgctcgattgttctcggcattgtaataggtcagaagcgaaaagtcgctttcaattgttctgcgaatagccatcaattgatgatcattgtgctttttagctcctgtcatatttttacgatatggtgtccaaagttcgtaacccatttgttttagctgttgatgcagttctttgcctaaatagccttcgtcgccaagaagatagtaattagatggatgggtattttctatcagttcaactgtctccctggcatcatgaactgatgcctttgttacgacataatcaagaatgtaaccgtcatcgctaacaatggcatgaactttgaaaccatagaagtaaattttcttggtggccttataaccaatgttggcataaccgcgaaaaattttagcacgatagtttcgaattggttggcaaacaggtaccggaaagctgtcaatgatcaagaactgtccattcaggtcaacctttttattcatttcttgccgtatctgataaatcaattgcaatagctgacgtgaacgccgattaaaacgtgagtgtgataaacaattgaaacattcacagaatcttctttgtgattcaattcctgtcttagcttgccagataagtaaagccaaaatcagactgtccgtagttttaatttgatcaatatttcgccgatgagtaaactcagccggtgcatacaaacgataccagtgccgacaaattatcactaaatctttaaaactaacttgtaaatggtggctaaaacgcttaagcttaaggcagttcaatcagatcagactcttttctattattactatttacaagtcgagtctaacaagattggacttttttattaactaaaacgatttaactagcaccacgcgtatcctatcatcaaaaaatagattgactttatgctgataacttccaataattagaataaatttttcttggagggaaaattatgaaaagaagaacaacacttttattgtcgagtgcagtaaccattgcggcattatttagcttcaactcaaaagttcaagctgcggctgatcctacgatcaaggcaacaaattacaacatgatcgtgaagttggacactcgcaagaatcaattaacagaaaaagttaccatgcacgttgttaataacggtaatgaacctgttaaaaatttattggttagaaatattgctagcggcgtgttgaaatacgaccacaagcattttgaggctacaagaaatgcgacaacttcagttaaaagcatttcatcagatggtcaaaagctttcttacactaccggtaaagacaagagcaatttatttgttaacaaaagtctaaatataggtgaatctactgatttaactgtcaacgtagttaccggcgtgcctaagagacaagatcgttttggctaccaaaatatcaacggcggtaaggtttataacctgtcattctgtttcccatacttaagcgattatcgcaacggtaagtggaattatcacccatactacgatgctggtgaaaaccgcaacagtgctgtaagcaatttccacgttagcttcttcgcaccaaagagctacaaagttgccgcttctggtcaaagcacaaccaaaaatggcaaaactacaattaccgccaacaacatgcgtgagttcgcaatcgctacttccaacaagttcaagattgaccacgcttatgcaaacggcgtaagaatcaacgactactaccttgcaagcaaaaacagcaagcaatacaacaagcttgctttgatgactgcccaagacagttttcacatttttaccaaaaagatcggcaaatatccttacaaagaaatcgatattactgaaggcttgcttagcaaagataccggtgggatggaatatcctggcttgatcatgatcgatgccagcggctttttactaaagaagcacccacttgatagatataatgaattaactgaagatgtttctcacgaagttggtcaccaatggttctacggcactgtcggcagcgacgaatacatggaaccttggcttgacgaaggtcttaccaacatccttgaaaatggcgtttacgatttgacctacactaagagtaaggcttactgtgctaaactgatgcacagcaagttctatactcgtaagaacgtcaagcgtgctaacaaaatcttaaaagaaaatgctaaccaattcattaataagaatcaaaaggccaactacatcaactaccctgttaataatccaccaaagggcgttgacactgaagacatggcttacgaacttgggatggacttccctgctgttttaaaggttgccatgggcgaaaacaagttcttcgatgctttacacgattactatcaaacttactgcttgaagcaagcaactgcacaagacttcttgaacattatccgcaagtacaataattcaaagaaggttaacaacgtgatcaataaatttattgatcctaagtacttaagtgaataaaatcaaataaccccgaaaacgtttgagtttcgaggttatttttatagtctcataagtgctaaaatcaacttaagggattattacaaaggagacaaaatatgactactaaaaaattagcaactatcgcagcagctttattaatcagtgttgcaccagcagctgctattatcaatcaacctgttcacacagttcaagcagctacgcaatcacaaaaaggtaaagttactctcaagaaatcctttaacggcacagttcaagtcttcaacagcaaaggcaatgccactaccactacccaaaaagtcaatggcaagaagatgactgttgcttcaacgattaaatcaggctcaagttttaaatattatggcaagcctatcctgatccaaggtaaaaaagtagatgcaaaaacttctaagaactaccactacactaccgcttcttacgttaacatcggtaaaaaacgctacatcaaatctttgaatgttagctcaatggatggacaaaatgttttaatcttgagttccaactctcgcatttatgataaaaacggtcaccgcactactttcaatggtttgtcactcatccctaaatatatgttagttaaaacaccagctaaaacccacgccacaactaagaatgacgtattttactacttctcaaatcttagcgggtctaaaaagagaagtttgaacacaaccactatcaagggtaagccattctacgccttaggtaatggcgcttatatctatgcttcaaatgttggctttgtcaacggcaacaccctttaccaagcttctggcaccactaccgccactattttaaacaaaatccatgttttgaataataagcttaaatcaaccagcaagttgctcaagattggtcaaaaagttaaggtagatgccaccaagaccactggtgaaggtgatgaagctggcctttacttcagaattgctggcaccaaaggtaaaaacgcacaatacatttactggggcgacgatgccgaatatggtatggatcaagaaagcactactgatgaatttcaaggtaactttaatttagataatcacctcgcaaattaacacaatatgctaaaattaaataaatgatataacgtagcgacctagaatagtgaggtttacctcaaagtatctttctaggtcgcttttttcaatgtggggggaaaatttatggatgaattatttgctaaagcgccgattaaaaggtctactttaagctagcattaccggtcgtcttagggatgatcactaccatgatctacaacttggcagacacgatgtttgttgccaaaacgggtgatacaaatctagtagcaggaattacgattggtgctccactttttacttttttaatcgctgtttctgacatttttgggctcggtggatcttcactaatttcacggctattcggtgaaagaaattatcaattaagtaaacgtgtaagcagtttttgtatgatcggtggatttgttactggtttaatactaacagccattttactaattttagaaaatccgatccttcatcttttaggagcaaaagctgccacctatcaagatgctgccgatttttatcgtgtaatatcaattggtgctgcgccaattatcttctcaatcattccgcagaacttaatcagaacagaaggtttagctacccaagcaatggttgctacaatgacgggaaccattttagctatcatccttgatcctattttcttgtttgttttcaaaataggtgcaatcggtgttgggattgccaacgttacaggttatctagtcactgatgctattctcatttactacgttttatacaaaactgactacatcaaattaaagctaaaatatagcaaaattagcggcaaaacaatcaaagatatcgtagcaatcggcatccccggttcaatcaccaacttcgctcaaagctctggcatggcacttcttaactcatctttagctctatacggtgcaaacaaagttgccgcaatgggaatcacccaaaagatttacagtatcgttatcttggtaatcgttggttttgcctttggttcacaacctttaattggttacaactatggtgctaaaaactggaaacgattaaagaaaattctaaacttcgatattcttgtgcaagttgtttatgctgtaatttcaggcggattattaattttatttgctcgtccagtcaccgctctatttatgaatcaaccagatatcgttaacgctggtaattatatgttaattgccactattattaccacaacaatcgttggtatcattttagtttacactaccgtcttccaatcagttggtaatgcatgggcagcgtttatcatggccatcgttcgccaaggcgttgtctactttatcgcattagaaattctaaaagtcacatttggctaccacggtatcgtttgggctcaagcagccagtgatatcatcacctgcatcatcggttactttatttatgaaaagagcctggatctcaaggataaaatcaaagattagccaaaataaaaactgctctcttattgagaacagtttttttcatgcttatctttcaattaaagcaatttttcaaaagcatcttcatacttaggaatatcacctgcacccataaagacaatgactgaattcttattcttagtcaagtcagcaatattgtctaagtcaattacttctgagccaggaatattcttaaccaagtcttcacttgaaatatcaccgttagcttcacgagctgaagcatagattggagttacgtaagctttatcaacgtcacgcaagatttcttcgaagtctttttgatacttcttagttcttgagaaagtgtgtggttggaacacaacaaccaacttcttgtctgggaacttttggcgagcagcttggatagtggcgcgcatttcagttgggtggtgtgcatagtcgtcgatgacggcaatgtcgccgaagtccttttcactaaatctacgcttagcacccttgaatgatggcaagcccttcttgatgtcttccattggcaccttttcggtgtaagcaacggccacaacagcagtggcgttcaaaattgagtggtcaccaaagaggtgaatctcgaattcgcccaagtccttaccgtgagccaaaacgtggaacttagaaccagtagtcgacttctcaatttgagtagcttgaaagtcatcagtatcattaaagccataagtgtacttaggaatatcggtcttcaaactttgcaaacgcttgtcatcaccccagacgaacaaggccttcttagtttgatcagcagctgattgaaaagcgctggtgtaatcggcttgatccttgaagtagtctgggtggtcaaagtcgatgttagtcatgatttggtaatctggatgatatgccaaaaagtgacgacgatattcatcggcttcatatacaaagaaacgtgaaccagcaacgcctttaccacgaccatcaccgattaagtatgaggtcggagcgacttcaccgagcacatgggctagcaaactagtagttgaagtcttgccgtgcgtaccagaaacaccgattgaagtatgactttgaacaacttcttcaacagtatctgggtaagactgccacttaacatctttgtctaagcaagccttaacttctgggttatcttccttgaaggcatttcctttaacaattacttgctcagcattgctcttgatattagctggatcaaaattcttaacttcaattccaacctttttaagtggaacttgggtgaaagtgtatttctcgatgtcactgccggcaacattatagcctaagtcatgtaaaagcagtgccagggatgccattccagtacccttgattccaataaaccaaatttgcttatttttatctaacattatttgtccctcgaaatttcaacgtttttattcgttaattattttaccatttttcttatgctaaaatttttaaaatcaaaagaaatctatgatgaaaacgacaattatgttaatactgtcgatcatttgatcattaaagaccttacgggtaaaactatttcccacaaaattggttcactagctccttaaaaggtgaaactggtggcttttcttagacaaaataaaaaagttgatcaattagcttttttgcaccaactggttaactttttatttttgctttattcaaattataaagtaatttcaccactagcaatcaattcatcacacttagttggttcaaattctgcaccaacttcgaagctatcaggaacaaccatgatcccgcgcttttgtggtgcgtgtggcaaacctaattcacgagctgaacaaatcatgccgtatgaatcaacaccgcgcaattcacctggccaaatttgtgcaccatttggcattaaagtacctggaagtgcaacaactactttttgaccttgagcgatatttggtgcaccacaaacgatttggtgttcttcaccatcagcaacctcaacagtagttacgtgcaagtgatctgaatcagggtgtggttcacaagtcttaacgtagccataaactaaagttggcttgccatatgctaacttgtcagtaaaaccaacttcatcaagcttcttgttcagtgcaacaagctcatcgtctgacaacttaactggaccatttggtaacttatcaaagtcaactaacttatcaacgttgaagaagttgtaaccaatggtcttgccttcatcgttagttacgcgagtaacgtcttctttttcctcaaatgagctacggccttcatcgtgacctaagataacgatcaaagtgttaggataagcttctttattagtactagtaatcatgcttttttttctcctctattagtcaagtgatcgtaaaaagttttccacttcatctttagttttacggtccttatttactagtctaccaatttctttgccatcttggtagacaacaaatgaaggaattcccataatcattaatttttttgctatgtcaattgaaccgtcgcggtcaatttcgtagaattttgcatcagaaaaatctttttcaatttcaggcataaatggagcaagaaacttgcagtctgggcaccaatcagctgagaattcaagcacagtacgtccttctttagtaatttcctttaattgatcttcagttaattctttaatcttttccatttttcatacctcatgtatttcttactttttataagttgatattattataaccattctttaactaaaaagctagaaattgagtcttacaattatttcttttctttaaatagataactgccccaacgaactggtttttcaacagttggcaaaaccatgaagtaaagtaaaaacaaatacccaaatggaataaccgagatccagtaccaccaaccggtgtggtcagtatcatgcaatcttcttatggtaaagccaagtaagcctaataagatccaaataatcagtagatagataattatttgaataataagtgtaccagttgaaacgtgcgttaataagaagaattcattacttgaataagcaatgccatcaattgaatatgccgtagctgaacatgctgctaaaatgactagcaaaataattgcccaaacataggcataccaaaatccacgacgagtactacgtgcattctacttaaatggtgcagtaaacaaaagtttgaatgcttgtccaaaagttggtctaggaatatcagttttaggttcgtgatattcttgttcataataaggtttatcttccataattttccctccaataatctgaaatcttacagttctattctaaaacaaaataactaaagcgatgagctagtagcaagattttatccaataaagcattaaaaaacgcctagagtttatctgctgtaactctagacgcttcaaactattcatcctcaaaatgagcgtgcaaagcataaattggattacccttagctgcaaatttatgctcgtattctgtttcaatattcttttccacaatttctggcttttcatgatgaagatcaactgaaacaaaatcaaacttcattccataattattcaagctctgaacagagtaagcatacaagcccgcattgtcggttttaaattcaatatgtccttctggcttcagaacttgttcatacttgctcaaaaaactcttgtaagtcaaacgacgcttttcatgacgagtctttggccatggatcgctaaaattcaagtagataacattggtgctatttgctggaaagaagcagttgatgtcagccgcatccccgcgtaagatttgtaaattatccaagcccttttccaactttgttcgcaagataatccccgcagccgtagtttgcaattctaatgcaacataatttttatcaggattttgttcagctaacgtagtaatgaaatgccccttaccagaacctacttcaatttcgatgggatgatcattaccaaatcgttcagtccagtcgatctttttttcaggatcaggattttgcaaaacactttctggatggtcgtttacaagcttaacagcccaaggtttatttcttaatctcattctctattcctatctaattccaaaatttttttgattcatttttttaactctgcctggcaagtaagtggcagttacaatcatagtgaaaccaagtaaaattgccatcgcttcaaacaagttaacattaattggtagcacaattaaccagcagacactaatcaagagccattgaataaacaagcccattgtcaacacctctaccaagtccctgccacgattttgccgttcaattgggtaaacgcggtacatgaagttgcggtcaaactctgttgccattggcaataattgatagaccgttaaaaagattaccaagcatgaaaggcctagtgcccaacgccaatcttgcactaaccacgataccaagattgcaaagacagtcattctgactaataagttcaagtattctggattacgcaaaagtgatctccgatacaagaacaaattaggattttccttagccaatgattttggtaaaagaaagtcgaggtatcttctgcgtttgattgtaacttgcttttctgccacatcggtaaacatactgaagattgaataaacgcgatcttttctagcttgttcagttttaatcgcatagcgccagttaaagacgcccttttcttttttagtaccaaaatgcgtaattaccattaatactacaacttcaattggataaataaatgatcctagtgagccaatcaacaaagccgccagagttaccactaataatatccattgcggataattgtagtagaagtacaaactctctttttcaatcagcaacatacacaattttaataaaacagtgctgataatcaggattacatatgaccaaactgggattccagcctttaccgtcgcaaacggaaacagaattccgccaagcaaaacaatcagaattgttggcagcaccatactgtaacgaatcatcggcttcagatattcacccatttgttcatcttgcgtaaacagaaattgcatgtcggcctcttttaataaggtaactaatcgaccagctaataatggcaaccacatgataaagccgacaagtggcttatagaaccacagattattgggaattacgcgcatagcttgggcataccagaacatcagcgccccaaacaaaaagatcaacgctaaaataaagaagtcattaaacaccagcgtcaaatattttactgattgtttaagattctcgctcaaccttctattcgctaactcacgcattgccattatcctctctattcaaagcaaggtataacttgtcaaaaggatcatctggcttaaggccatagtgctgacgaatttcttgcaaactccccacaacttcgatcgtgccgcggtttaacacagcataattcgaaatcgcttgctgtgcatcagctaaaacgtgagtagtcattaagaccatctttttgtcagcaattgctttttttattaaatcgattaagttagcaactgccaaaggatcaaggccagtaaatggttcatcaattacaagcaaactagtatctgctaaaaaggcagagacaatcattactttttgccgcatccccttagagaagtgaatcggcagccattctagcttgtcatcaagtctgaacatcttaagcagctcatgtgcgcgtttccatgctttattttcatccaagtggtaactcaacatggttagctccaaatgttcctttaaagtcaattccggatacaaaatcggtgtttctggaatataagctacttcacgcttaaacttagttggttgctgcgtcaatacaacatcgttcaagctgatcttacccttttgcgggcgaagtaaacccaaaatatgtttaatcgtagttgacttccccgcgccgtttagcccaatcaagcctagtgcctcacccggcttaatttccaaattaatatctttaataaccgggacacccgtgtagcctcccgttaaatgttcaatttttaatgtcatttttcctatctttctttactgaatttatacctttattatgatagcatggatttaatagtaaactaaagtacaaggatatgaggttttattatggaaaatttagacaaagattgtttattctgcaaaattatccgcggtgaaattcctagctataccgtttttgaaaatgacgatgttaaggccttcttagatatttctcaagttaacccaggccacaccttaatggtgccaaaaaagcacatcgttaacttgtttgactacaccaaggaagacgcacaacgctatttacaatatattcctgaaattgctaatgcaattaaggcagccttccctaatgttactgcaatgaacattactactaataatggtaaggccgcaaatcaagtagttatgcactcacacattcacttcattcctcgttttgaaggcgatggcttgaagctgatgacccgcaacaacgctgacaaatacgatgaagctaaatacaacgaagttgctaacaaaattaaggcacaattttagaggttaaaaatgaaacatttcttattaggcacagtttttggtgcaacagctgggctagttttttcctgtatgaaagatagcaatggtaatcgcccaggcaagccattaaaagatgagttcgaagcaattaaacatgaaagccaacgctttaattctgccttgcaaaaagctaaaaaggctagtcaagaattaaatgaacaaatgccaacagctgaacgtacaattagtgatattaatgatagtgttgaacattattccgaccatattcaacctatcgttaaccgcatagaaaaaaagagcgataaattgaaccaagatttggaaaacatcgtgccagatactaactcacaagacacaaagaactaagaaaaaataaagaaaatttgatttttctgtgaaaattcgtaatttgaaaacgaaacgcccttttttatggtatattaatgaacagttacttatttaaggatgtggagatattatttttatgaagagttatatgaaaaaaattgctgcagtcgtagctgtagctggcgttgcattatcaactgctgcttgttctaatagcggcactaaggctactgttgcttcctacaagggcggtaagattactcaacaacaatactacgatgaaatgaagaagtcacaagccggtaagtcaactttggctaatatgattatcaaccgcgctttggaacaacaatacggcaagtacgtatctcaaaagaaagtcgacaagcaatacaacaactacaagaagcaatacggctcacaatttagtgctgttttacaacaaaacggtatgactgcttcaagcttcaagcaaaacattaagactaaccttctttctgaacaagcattgaagcacattaagaaagttactaagaagcaagaacaacaagcttggaagagctaccaacctaaggtaactgttcaacacatcttggttgctaagaagtcaactgctcaaagcatcatcaagcaattgaaagatggcaagagcttcaaggttttagctaagaagtactcacttgatactgctactaagaacaaggctggtaagttgccatcattcgactcaactgacactactttagacagctcattcaagactgcagcattcaagcttaagactggtgaagttacttcaactccagttaagtcacaatctggttaccacgtaatcaagatgatcagccacccagctaagggtaagtttgctgatcacaagaaggctatcgatgaccaaatttacgcatcaatggctcaagaccaagctactatgaaagacgttattgctactgttttgaagaaggctgacgtttcaatcaaggatagcgacttgaaggatgtattatcatcatacgtttcaactactaagtaacaaatatatttagttaatcaaaaacgccgaatctgaatggattcgacgtttttttatttcattaatttatttttttaataggggcatcatattcccccccagtaaaaaaactatgccctcactggcaccttcctagtagcagctgagttggcataaataatactttgaaattcattatgaaaagcttgagcattatgcaatacagctttataatcatcatttttagcaggtccaactaatccgccacctacaccaacaacataggcaccactagcaaaccattcatgcatatttcctaatgatacaccaccacttggcattacattaacatatgggaaaggtccatgaatttcagaaataatgcctttaccagcaattgaacctgggaagattttgactacgtcagcaccataagttaaagcagattgaatttccgttggactaaagcaaccgggcatgtaaggaaccgcatacagattgcattccttagcagtattttcgttaaaagatgggctaacaacgaatctagctcctgaaacaatcgccattctagcagttgcctcatcaagcacagttccagctccaatgagtatccaagatttcggtcttggatatttttttactacaaatcaaaaggctcaagatgcttcatcattaaagcattcttgagctctttaattttatttatcagtagcataatcagacaacttcaagtagcgtacaagttcactcttgaaagtctttttattataagtcactaccgcaattttacctttataaaagccagcatattctttttgtaaatcaccatggatatcacaattagccaatgaaactacccaagacttttctgccttagttagtttattcatgtttttaacccaaactttttgtccgtctaatttactttgatcgtatttaatttgccaactagcctgcttaactgccgcaatagaagtattcttgttagtcaataacttttgtgcgttatcaacggccaaatcatatctttcttgctgtgctttttcagtcaaacgatataaagtcgattttttaatttgacctgctcgatcaactaaggcttgcaactcaccatagtcactagcagtggcctgacttgcatctgcttgtgcttcgctcggtgtattatcaacttttaatgcaactggattttgacttgtcacatcactagctttaacaaaagtatttgctgtatctttagtttggtgagcatatgagccgttgctggtaatcgtagtaccagtcttgcctgttccatcaagagctggaacccagaccaattttttgttagccgtaagatgataatatagatcagcttgtttagtttgcttgttccaaatataaagagctcgatcaacgccaacattaacatctggaatcaataaataactcttatcaacgatttcaccgtcaatattatagagatacgttgagttaccggcaatgacataattatcttcagtagatgcagctaatgcaaaattatttggcataatccgagttgactttttgatagcaggtaggttgacccacttatcagtacctttaatccgataatattccagactactcaaataatcatcagcgccgtcaacattatgataatagttctgatcaactgtaagcttagttcccttcttaattggagcagcaattggcatccctatttgattagttactggagcagtctttttggtaattaccttaatttccttagttgacagatccgcatattgatattttcctggcgagattctaccaatgttgcctggcttaatatatttatttttgccaatattaacaaagtctgtcttcttgatgcttactgtcggtaacgaaaaatacttgccagctaatacattattgaagaaatacctgctttgatttgggttagtaattgccttaggcttcaatatagtcacctttagtaactttcccttcttaatcttgctcttggtacgcttaccttgatgattgtaaacataggcattgtggttaatatagaacgttaatttagtagtttgtgtattatcttgacttgcggcaacaactggattagacaaatgattatttgctaaaacaggtacagtcaacattatcgtagctgccgatactaaaattaatttttttgatgctttcatttttattccctaccctaatttttataacatctttagcaattcaatgcatcaaaaaagtccaagaggaaatcaatgtatacctcttgaactttttatcaataaaaaaatagaaaggagacaagtctctaatctatccaaaaacatctctgcttttcaattgtataaacatgttattattcttcagctaatttgtcaataactttgttcaaaaaattattgacacaatttttcaccaaaacaaaataagcatccctgcaaatcaaccgcagtgatgcttatttcttattctaaatgttccatattgcctaatgctagaactaatattatttacaatttcagctcaacacctttaatcaactatcacattgccaatttaaatttggaaagccattgctctctttctgaccaagaataaacaggaatattatagttcttaaaggcagacttaaaatcactagaaacaggactattaatattgttcgcaataactgaaaattctgttttaggttggctttctcgtacatcaataattctaaataaagggttagctatattagaattaataggcgtattcaccaccttaatagcttgttgcggtttttttcttgtacgtccaaccacaatatcaaacttagaattccgtccgctttttcctagtaaactcaaatcttctcctactggaatattattatcaataaaataatttgttacatcttctttaaaatacttaataacactatttttagaagtctgtaataaatcaaaagcttgcaacatacattgagttaacctattttgtgcatctggaaattgggctaagtcatcaaattcaattactaattcattattctgatttttcacaccaaaattaatcaaaatcgattgaaagtagtccctacgtttagattttctgtttaaattaatatctaataaccctaactcattaatagtatacccatcatcactaattatatattttgatgtatttccttgtgcaatcactaattctatataatcattgtacatatctaaaaaaggtgtagtgatagtcatataatcctgatttttagaagggacaaattgaatctttttatctatccagtcaaaatatattttcttcattttctctacatcaaacatatttaactgttctcccccctttctttaaaataaactttcctgttctcgaaaattatatgaatttatattatcaacattcaaaaactttaatgtcttcttcaagcattcacacaagttatttaaatcattctgactcaattgaaaattttcattcttttccaaaagtggtacagctacatatgtaccatattttggaaaatccgctctatgcaaatgaggacaaggaatgactttatttgaccatttaaagtctccaacaggattttgatgaggacgtccaataatatctactctaactaatggctgttccttatttctcttttcccttaatagaaaagtacatttaggacgtctatgtccttttctattcaaatcaagtataaaattataattatttccttttaaccttaattgactagaattctgaaatagcggcaaatcaatgtaatcattcttttctattatttgtttaaccgcctcaatcattttagtaatttcagcaatatccatcctttttactcccctataaattagatttattatactatgaaattataataaaactctagttcaatttttcaacaaaataagcatccctgcaaatcaactgcagtgatgcttatttcttattctaaatgttttgcgttatctagcgctgaatcgtgcatcggtcgataatatcgcttgccatcttgactcagtagtggctcggtgaactcgcctttaggcgtatgctgcagggcattcgttactgcataaattgcagcatctaaatcatcaattcggtgcaataattccgcttctagcaatgccggcaatttgggtgaaccatattcaaagcggccatggtgactaagcaccatatgccgcaataagagtaaatcttccgactccagattcatcttcatatcctgagcggccagcataatttgttcatcaattaaaaccagatgcccaaccaaatttccttcagtcgtgtattgagttgcggcagaacctgaaagttccagtacttttcccatatcatgcaaaatacatcccgcataaagtagcgatctattcacttgctcataattatcagccaaacctttggcatccttaagcatcgataaagtatgaaaagctaaacctccgcggaccgcatggtggttgcttttaccagcaggatgatcataaaaacgatcatgccatttttgaagtaaatacttcacaatttttgtccaggtcggattatcaatctgcatcacaaatttattaatttcagcttccatctcattaactggttccggcgctgatttaataaattgatctaattcatagccttcttgtggaccgaccacgcgcagagaatagatcctaatctgagggcgaccctgatattcttctcttttgccattcaactcaacgattgtcccagttgaaaaagttgctgcatcttgattgttagcatcccagtaattaccgcgaatctcgcctgagccatcactgaattgcatcgctaaaaacaacttattctttttattatgacgcaactgtgagtttctaatcaaaacaacaatgtccatttcttctccatcgttgtaatctaacaatctcttaagcatcctgtgttcctttcgtaaaagttaatggctcaatcccaagctgatcaactaaattcttttgagctgtgaaaattaaaacttgattgttttcgctaatcttttgcaataactgatcgatatagctgactcgctgatcatcaaagtttacaaacgaatcatcaatcaagattggcaaattaatttcatccttgatctgctcaataaaagctaacttcaaggcaaagtataattgctcagcagtcccccgtgacaagtattttacttcgcgctttttaccatcacttctgactactgttagcttcttatctaaattaatcccaacatatctgccgcccgttagcaaagctaagtattcctgagccgccttaagcatcttggggaaccgttcattagatgccaagtcaagcgagcgactgatccaccttgccgcaaacaagttagccaagtattctttactgctctggacaaaattggtttctgtattagccagatcctgcttagccttaaacaccgcagtagaatcagctaaattgtctaactgcacttgcaactgagcaacttgactctgaagttcattaatttctgcattcttagtactaatttgttcagtcaaagccgttaatttatctgctaattcggttgaatttgtctgcatttgcagctgttgaagatcatcgcctaacgattccttcaaggccgcaatctgcgtcttcagtttagcctgattaagtgaatcttgataaagctgatcgtaacctgccatattttccacattagcttgggcaaaaagtgcctgtaatttcagacccaattctttcaaatcttgcttgtcctgctttagtgatgcagttaagctggattttctttgaagcaattcttgtttttcactaatttgtgtctcaagttcgtccaaaccgttcaaaacttgactaaagtcattatcaatcggttgcttcaatgcattttggacacttgaggccagttgagccacattctgattcaaaacagttacttgcttattattagtctgtgcggcattctttttgatttgatattggttcagattagttagtaagctatttaagtttagcgtatcaggattcaatccatattttgtttggaaagcttggcgtttttgagcaaccagcttttgcttttctaatactgccgcattttgcttattttggttactattttttaagtatcctgctgctaggaaaattagtccagtaattaatgcaattacaccaactgtacccaacgctaccaaaagaactacacctaatgccgctaacactgcaccgataacataccaaagcttgtcattagtagttacataagcaggctcattgacagcacctggcaaagcttgatagtctgcctgcatttgttcaatttgctctggtgtcaacttgagtagattttttaactcaggtgtcaaagctaatagttgctctttctcctgcttcaattggtcagccttttgcaaacaattacgatattccgcttgccactgcaagagttgaggcttctgctggattagcttcttctctagcgtaaaatcagactgatcgttttcacccaggccctgcaactgcgcttctaccgattgaatcgtcttttgcaaattacgtccctgagccataatatcttgggctttttgataattttgaccattaaagtcgacatccttgacctgtttttgcaaatcaagcagcgtctgataattgcccatttctttttgcaaatcatgcaaatcttgttcttgtttttgtaaaacagccagatcttgtttttgtctgtttaatgccgctcttttttgtacaaaatcttggtgcagctgttcataatcattaaactcatttttagtctgcgctaatttatcacgttgatcagtcatttccttaagcagacggtttacttcgggctttttacctgtctttttaaaaagcttacccgtttctttggcaaaatcgtcgcgcatttccagcaacttgctagaatctgctgctcccaagtaataaattcgctcaagcaaatcctcttgacttaaactgttaacctgacccagcatttcttggttaaaaataaaactatcagcgtaaaaagagccatcaatattttgaatttgatcaaaaaatacactctcaggtacaacttgaccatcttttttgacggttaaaattccctttttagtcttgtcacctttagcatagagtcgctcaagttcgtattcaccatcagctgcagtaaaaactaaattaccgcccatcggactaacatgagctagcggcgtataatcttcaaaaaacggtgaagagttacttctcaaatgaaagccaaataagatctgtttaataaaagctaccgttgtacttttaccagcttcattggcaccaaagaaaacattaatttgatcactaggcaaatcgaaggttttattcgagaactgcccaaagttaataatcttaatttgtttcagtctcatccttaattcctttcaatttactcattagttttacttctgttagattcttaaccgccgcaataaagtctggatcagccgctaatttagcagcttctggatcctttttttgccagtcactaacaatttgcttgaattcagctggtgcaaataactcttctttggcagcttggaaggcttgttggtcattgtcatttaactttaaactagtattcacaacaaagcgcacatcaactaactgagaagcaaatggcagcgattgagaaatagtttgccaaaaatcaagatcctgaactaaatcgcgttcttcggcactcaaatattgagcaccagcaatcgtcaaactaaagtacgttttttgtccagattcaagcttggcaataattttcgcttgtaagtcagctttactgatagctccttcaagattaatttttgtcccttgccataaaattggccctgtttctttaaaatcaatagtagtcttaccactattttcatcaatctcacctagatagcatcccttggctcccatctcattaatgtggcgaccttgaatgttacctggataaacaatccacggcgtactacttaaattatttctcgcatgaatatgacccaaagcaaaatagtcataattcaagttttgcaactcatcaactgtaaacggtgcatacacattctgactagcagtagctgatttctcttgagcatgcattaaaccaaaagtataattttttccttttgctgggaattctgggattttatcctcagtgatatggttattcagatatgaaaagccgattacgtcatagttaaaacccgcatccgtagtaaaagtagcttgctctactgtttcattattgcctaacaatttaaagtaaggactgggactaactagcagatcttcttgcttcatgtggtcatgattaccaaaaatcatcactacctgaattttttggtcagttaatcgcttaatttgcttggcaaaaaatagctgagctcgtggtgatggcgtattactatcaaaagtatcaccagcaattaaaactaaatcgacattttcttgcaaggccagatcaacaattttagttaatgattgatcagctgcttgatagatatggttaaattcctcagattgcaaaaaagatagcccacgaaatggactatctaagtgcgcatccgcaaagtgaataaatttcatcgcgaatattaatttctaagatcttcataaagatcattaattggcttagtgtaagctttttgtacttcaccaagcaaatcgtacaacccctgttcattcgtaagaagtgaaacaattttatcattcttttgaacttgatcatttaagtccttgtaagcttgttgatcttcagctgaaagtggttgaccagcttgttgtgcttgcatgatcttattttgcaattcatccatctttttgaataaagctgaagcatccttatcatcttcaacagctttaattgcttcttgcaacttcttgtattgatcagtttgagtcaaatcttctgctaacttgttagcagcatcgtaaatgttaaccatctagtcctcctaaattttattggccaaataagcctttaaggctattataccattcattgattttctgtcctgcagaaccgagtccatcttgaattttttcacctaatccattagtccagtcatcattagaaccattattcttcacaatctggttaggtgccttctccgtgaattcagtttgcgcggtgtacggcaaaattccttccatctcagccttatataaacgcgtaattcctgtttcagaaatgccctgcatgtagtgttgcttgttagtgtggtcaaaaccaacccaggtagcaagtacaatgtcaggcgtataaccgacgatccactggtccttggtaccaaatccatatgagttaggtacttcagttgacccagtcttcccagctacacggaagccatttggctgagcagagcgtcctgtaccattagtgaaaacgccgagcatcatagtcgtcatttctttagcagtattttcagaaataacgcggtggctgcttggattattattttcggctaaaacgttacccgaagcatcagtaattttggtaataaagaaagaattattaggcaaattacctttgttggcaaaagctgaatatgcacgtgccatctgaattggcgaaacgcctgaagataatccacctaaggcaagcgctaaattacggtcactctttggtaccttaattccaaagttttcaacagattgcacgcctttacttacaccaatcttatccaatagccaaacagctggcacatttttactttgttctaaagcttcatacattggaattgtattagaatagccattgtccacattatgcggttcatagccatttttaccaaatttctgcaacttgttcgatagttgcgagtcatagtgatagccattttgtaaagctggggcatatactgccaacggcttgattgatgaccctggctgccgcttcatctgcgttgcacgattgtaaccccggaagacgtgcttaccgcgaccaccgatgattgcccgaacagcaccagtacttgggtccattgccacgctagcgccttggctttcagttccatcactaccattttgtgggaaaagccagctttgctcaaaagtatcctgcaatttaccctgataattttgatttaaagtagtataaattttaagccccttattcatgacttgttcttcagttaagccatatttagagattgcctcgtcaactacagcatcaaagaagtaaggatagcgatagccgtttttattttgaaaagtattccgcaaagttaatccttgcttttgatacattttagcttgagccgctgtcaacttattattatccaccatcaagtttaagattaaatttcgtcttgctaaagcatttgacatgtgatcaaccggattataaaaactaggatttcgtaaaattccagctaaagttgcggcttcactcggattaagttcacttgcgtttttgccaaaatagcgacgacttgcatcttgcacgccccaaactccgttaccaaagtaagcattattcaagtacatcgttaaaatatcttttttggagtaaacatggttaatttcaattgcaaaaaagagttcttccaattttcttgaaaaagtctgctgctgggtcaaaagcgagttcttggctaactgctgagttaaggtcgaaccaccaccagttacttgaccgtgatgaatcactaaacttaaagtagctcgcgccatgcctttaatactaaaacctgggttcttccaaaaagtccgatcttcagtcgaaattacggcattttgaatattaggcgaaatctggtcatattccacaaatgatcccttttgcgagtataaagaacctgcttttttacccttgtagtcatagattgtagttgtggttgaaagcgaagccttcaaattagctatgtttgatgtcttaactttaattgtataataggtacaagttaagagcatcaatgtgagcaggattaaaataatccagcgtccgataaagaagcgactatcaaatcgatgccaagcatctttaaagccacctcttcttggttggtcgttattcattaaatattgctcctttttagaaacaagaaaattgtaccatactatcaaaacacgtgtttataactagattagacttaagaaattattatgagtttccgttttacacttttttacccagaaaatcttgctccggcatctgtcaatgaagtactacgtcaacttttaatccctcgcaagtggcgtcattttttgcgaattgaacaaaatattttagttaacggcaactatcgctattttaatcaaaacattttacctggtgataaaattgaaattaacttggatcatgttgaaagtgatcaacaggcttatgcaccaagcggtaagatgcccgatgttatctatgaagatgataatcttttaattattaataagaaaaaagggcaaaaaacgcaccctaatctaaatgaaactaatactgctctgaacgattgtactacttatcttggtcagagtccctatattgttcatcgattagatatgttaactggtggtttacttttaattgctaaaaatcctgcagttgtacctattttaaatcgtgaattaaccagcaaaatttttcatcgcgattatttagctaaagttatcaatgctgatcacttagctgaaagaggtacgattaatgccccaattggtcacgatccacttgatcaacgcaaacgcaaaatcgatcctactggattaagagcagttactcattatcaagttttacaaaaaaatgatgacaatactgcgattgtcaaattgacgcttgaaactggtcgtacacaccagattcgcgttcaccttgcctctttaggaagtcctattgtaggcgatcctttatataaccctgattttgccagtgagagattagccttagatgcttacgaaatttcattagttcaaccttactcttttactaaattaaatgtaaaattgcccaaaaacaaaattgaactctaaaaaagcctttgactgcaatactgcaatcaaagacttttcatcaaattataaattttaccacgcgtggtgctagttaaatcgttctagacaataagccaaattataagctaaaattgcaatttccaaccggctttgaaagcctatcagactacgtgctcgattgttctcggcattgtaataggtcagaagcgaaaagtcgctttcaattgttctgcgaatagccatcaattgatgatcattgtgctttttagctcctgtcatatttttacgatatggtgtccaaagttcgtaacccatttgttttagctgttgatgcagttctttgcctaaatagccttcgtcgccaagaagatagtaattagatggatgggtattttctatcagttcaactgtctccctggcatcatgaactgatgcctttgttacgacataatcaagaatgtaaccgtcatcgctaacaatggcatgaactttgaaaccatagaagtaaattttcttggtggccttataaccaatgttggcataaccgcgaaaaattttagcacgatagttgcgaattggttggcaaacaggtaccggaaagctgtcaatgatcaagaaatgtccattcaggtcaacctttttattcatttcttgccgtatctgataaatcaattgcaatagctgacgtgaacgccgattaaaacgtgagtgtgataaacaattgaaacattcacagaatcttctttgtgattcaattcctgtcttagcttgccagataagtaaagccaaaatcagactgtccgtagttttaatttgatcaatatttcgccgatgagtaaactcagccggtgcatacaaacgataccagtgccgacaaattatcactaaatctttaaaactaacttgtaaatggtggctaaaacgcttaagcttaaggcagttcaatcagatcagactcttttctattattactatttacaagtcgagtctaacaagattggacttttttattaactaaaacgatttaactagcaccacgcgtattttaccaattatattcatttggatcctttttacctaagccagttgtatgatcaaggaggatcctctgctcataatgagctacatttagcttagtcgccttcaccatgtcagggttaactgatacaaaatcaatgccacttctgactagaaattcagtaaattctggatattctgatggtgcttgaccacaaatcgaaaccgtcttaccatcttgatgagcaacctttatcaagtgcctaatcgcccttttgacggcaagatttctttcatcaaaaagatcagcaatcacatcattattccgatcgcaccccagtaaaagcatcgttaggtcatttgaaccaattgaataaccatcaataaattgattgaactggtccgccaaaataatattagctggaatttcagccatcatgtaaaccttgaagtctgcgcttctaactaaaccttgtgtccgcatgatttccgtcactttgcgcgcttcatccactgttcggcaaaatggaatcatcacatgtaaattctttaatccgaactcatcgcgcaccttttttaccgcttcaagttccaatttaaaagcattaatatattttggatcataatatctagaagcaccgcgccagcctaataggtctgctggttcatgcggctcatatttgtcgccgccctttaagttgcgatattcgccagacttaaagtctgaaaaacgtaaaactactggccgtggtgccattgcccgcgcgactttaccgattccattagctagctcgttaactaccctctctggatgaccagtttcaatcaaataaaggggatgctggtgaatataagtcgtccataaaaattcttcgcgcattaaaccaatcccatcagctggcaaagatgcatatttttcagcaagatcaggatctcctaagttcatcatgactctggttgcagttggtgggaaatattcaactgcagcaggctcagctggcttttcatcgacttttttaaccgcgtctttaacaactccagcataaaccacaccatttttagcatcgacggtgacagtctcgccgtttttcaaagttttcgtagcagcttgtccacggctagttgttccaactaaacaaggtatctgcatttcacgtgatacaattgcagcatgacaggtcattccaccattattggtaataattgcggccgcctttttcattgctggcacccaatcaggcgacgtcattagagtgaccaaaacctcgccctgcttaaattcattgatatcttttggatcatcaataatatgtaccttgcctgagacaaaaccaggtgaagctggcaagccttttaacaatactcggtgttctgtagttgcttcttgtggtgcatcggttttctcctgctttttcttttgtgaccaaacagtttctgggcgtgcttgaactaaccacaacttatcattttgatcaagtgaccactccatatccatgtagcagccataatgtttttcaatttctttagcataaccagctaattcaatgatttgcgcatcagtcaaagcaggcttattcacttgatctggtgctaccttttgttcaattgttcctcccgatggcaatctgatcaactcaattggctttttagtcaccattttgtgtacaatcttcatcgtatttttatcaactacatagttatcgggtgtaacagttccagacaccacgtattcgcctagtccccaagaggcctcaatcataaccttagtgtcatcaccagttgctacattgaccgtaaacatcacaccagctgctttagaaaaggccatcatttgaatcgcagctgataaagcaactttttcttgtggaaagttttgtttaattcggtaataagttgcccggtcggtgaaaagagaagcgtaacattcttgcacctttttcaaaacattctcacgaccatgaatatttaaataagtatcttgttcgccagcaaaactagcatcaggcaggtcttcggcagttgcactagaacgtacagcaacgaatggctcattttggtgcatcttttgggctaagctatcgtaagcacagctaatttctaaggctaaatcatttggcatcggcgcttctataattaattttctaattttggtgcaaattcgatgcaattgctcagaatcttctggatcagttaaagtggccaataatttatcaattttttgatttaaatcagaataattcataaagtggcgataagctatggcagtagtcgcaaaaccatacggaaccgggacattcgtttcagaagtcaactcacctaatgaggatgacttaccaccgactaaatcaacatcatcgcgatgcaattgatcaaaccacaaaatataattatctctattcatgcttgttctcttttcgttaacgcacaactaacatttcatttttagctgctttatttaaaaccacgaaactgtcaaatcttttgtgtaaatagttctttctcgtaaattgattttttaattatttatttaatcaaagtaggattctaaggtgtcctgaacctgaccaaagcctttatgaattcgattgaaataacggtcattgtagctcattgcctgaataccaataaaagcatcaagcgactgttcagttggaaactctgccttaggcttagctttgcgcttgatcacattgttaaatgattcaatcatgttagtcgaataaattgaagctctgatctgcttgggatagttataaaagaccagcagatctggttctatgtctttcaagcttctgataacatggctgtaaaccttgccccatttggtatagaagtcatgcaggacagctgtggcttcttctttgtttgtctgttgatgcacctgtttgaattcgttcatgatcttttcacgatcgtcgacgcgtactttagcgcagatattgcgcatgacatgaaccaaacagcgttgaaaatgagctttaggataagtcctggccaaggctgttttcatgccaacaacaccatcagaaagaaagagttcaacttgcttcaagcctctggacttcatgttttgaagcatctctgtccagacttcaatgttctcactaggagcaatgcagtagtcaatgacttccttatgtccattaggtttaatgccaatggcaatatagactgcttcacgctcaaacgtttctcggcgcaaaggaaggtatgtcgcatccaaatagacgcagaaaaacttgtcgcttagcttgcgtttgtggtaagcctcaacctttggaatcatctgcttggaaatatttgatacctgagctggactgtaatggctgccatacatcttttcaattagatcggctatttccctggtggtcacgccattggagtaaagcttgataatcatgctttccaagatatccgagtgctgcttgtagtcaggcagcgtgtgctgatgaaattgaccgttgcgatcccgaggcacttgcacttcaattgggccaaattgcgtatcaactttgcggaaataagcaccatttctagagttgccagtattccagccatttctggcatagggatcatagcccagaaaggcagtcaattcagcttctagcaagttattaacagcctgttgtagttctttgcgcaataaatcatttattttgtctggattgaatagagcttgagcaaaatctttggtaaaatcattcatgaaggagttcttctttctgtatgtgttttttttgttcaaaccaatcatacgagaaaggaactcctttttctaatgtttaaagaaataaatttaaggaatcattcatccttacacaaactattttacagtctcaaaacccatctttagcgggtgctacataacttaaatatttcaagttattatcaacagcagacatttttactatcccgcaattatcatattctttaaaagttggatttactcgctgcgtaaataaccttaaagccgtcccatgtccaacaatcaaaattgtatcgttggcatgggttgaatcaatgattttagtgatcgctcgttccattctttcttcaacatgttgatccggctccattgcggcattaatacggctaaagccacgtcgccatggcaacatgaattcatcttgtccttcatattcaccatgagatttttcatgcaggtcacgcagtcgcgtataagacaattgattatcagttataatttctaaagtatcgcttgccctttcctgctttgagcaaaatgcggcatcaaaactaatttctttttgcaaaaaatacttccgcaccgctgtcgcctgcgctttccctaattccgtcagaggagaatcacaagtaccttgtattttatgatgcacattgaacaaagtttgcccatgtcgcaccaaatatattgttctcattaactgctactctctttccttttatgcatattaattgtgaacaactgtatagtaccacaatattttgaaagcgcttaaagttatatattaagtatatataaagctatataccaaatttgtgaaattaatataatgattatgcatttatttgtcaaaagtagatttggcattatctagggcttgttaaataatgttcatatttggaacggtctaatttattgagttgctggataattataaaattgtgatgattgcagccaaatagtaaatctttttaattaatttaaaagttagtgttttttaatgctattttcttgcttttttacaaaaaactatatctatttttcgagttaagagtataatttttggttgtactatttttcacttattttttctactaaaggagaagaaagtatctattatggaacatacttggttaatgaagtattttgccgaatttttcggtacgattattttagttgttttaggtaacggatcagttgccaattctgtactacgtgataccggtgataatagccgtgacggtcaagccaatggtgggtggctcttgatcgccttcggttttgggttgggagtaatgctcccagccatgctcttgggttcaatttcagggaaccacttaaaccctgctgttaccttagctcaggcttgttcaggcgtcttcccatgggatcaagtaatgccttacatcttggtacaaatgcttggtgccatcgtgggacaactaatcttagtagccgtctactggccttacattggcagaaccactagtgatgatgctgtttttgccagttttgcgactggtgattcggctaacagtaagttcaacggttttattaccgaattctttggcactgctattttgcttttcatcgcagttggtttatatcgtggcatgttcttcaagcaatctgaagacattgctaacatcggggttggtttcttaattactgctttagttatggcagttggtgggccaactggaccagctttgaatccagctagagatctaggtccaagaattgtttatgctttatgtcctttgccacacaaaggttcagcccactgggattacagttgggtaccagtggttgcaccaattgcaggtggaatctgtggtgcattattatacaaaattgcatttggattataagagatctaatcaaatagtaaaaaaagcattaagctatctgcaatagcttaatgctttttcaatactcggtatctaaacctaaatagaaaattgaatctacatttttagtttcattatccgaattatcttttaaaaaaatttgtggtatatctccaaaagtcggattaaaaggatttttcattttaaatctctttaaatctaaaatagagtagagggagttttataactcgcccctctcattgcaccggacgtacggttccgtatccggcgctacgtttgtgattatttacgagataaataatattctagcggatcgaccaagcctgggcgatccgctttgcttatgcccaatacttttgggctaagcagaaagttaatgacatgacccgtacttcttttataccaacctaagcgcgtattagctactttatgaatatcttcatcactaaaattgcactttagtgccttgttaatccgcattaagttaatgtatattcgttttggtagtttccattgtttaatgattaccacccgtactttatgacgcagccattgactgaacttaattagaaaatatttcatgtcgccaactctaaagtaattgacccagcctctaactacttgatttatcttagtaaagactagtgatagaggctgagcagctgcttttctgcgacagagaagttctctcatcttgtcataaagcttgattttgcggtcatctcctggctttgcttgccagtattcgccacttttccagaaggtaaagccaagaaagttgctcttggttggtcgtacaactttggttttggttgcgttgacctttaggaatagctttctttctagccatgatgaaattgaattcatcacacgtttggctgatttaccgcttttgacaaagatattgcagtcatcggcatagcggacaaagcgcaggcctctttgttccaattctttatccattttatctaaatagatattggatagaattggtgaaagagggccgccttgtggtacacctagtttattaggcttaacccaaccatcttccattactccagctttaagaaaggctcgaattaaatggagggtggttttgtcatttacttgctctctaattattgaaattaatttatcatgatttaccgtgtcaaagtatttctcaatatccaggtcaacaacccattgatagccttcgtttaaatattccaagacttgttcaatagcgtcatgagcactgcgtccaggtctaaagccatagctatgctcactaaaatgaggatcatagatcttcattaatacttgggcaatagcctgctggattactcggtcaacaaccgtgggtattcctaaaggacgtttcttaccattagctttaggaatgtagactctgcgaacagcttgcggacgatacttcatcttcatgatggcgtcctttatttctacttgatgctttttaaaatagctatcaagctcatcaactgttctcctgtctacaccaggcgctcccttattgattttgactctcctgattgcttccttgagattgttttgacttaaaatctgttcaattagttccatctcgtgatatctccatttctacttgtaaatttattcagaattgtcccaattgctttcaccatcaaagagttacgttctctttgtgctaggctatcctcttatccggactgtctgaacattgcttatagcgagatatgctcttacaaacattaggcccttcgctccagtttcattacaaaaccttcagcactactacgacctcagctgacttctcgcgattaacctttttcgaccaggcttacgatcgctgatattaaagcttactcggtttcacctgtccacgagatctctcggggtaagacattcatctttaattttccactgccccctggtttaccgtcttggttttacggttgtcctttggactttaacttgtgctgcagtctcatccaccatttggcctgaccaggtttctgtacgtaggctcggaaaactcgctagccacttccttcacccatagcgtcaccgctaacggcttgtggttcgctacacttggcgacaactacccgtgatctagactttcactagactaaacaaatgccatgcccgacacacagcaaaaaaactgtctagttcttaactagacaatttttgcgttaaataatcccacgctgcaacgccataaaaattgtaataatcaataaatctgcactgccaccaaggctataatttttctctttaaaaatctgatttagttctaacataaactgtttaccagcttgagtaccgtagccacctaatgccaaatatttttttgcttgattatgtgcccaagaaacaacctcaatatttcccgctctttttattaaattcgagtcttcaatcgcactaactattttcatcaacgtatcgagtaaacgaacattcaaatcaccttcggtttgagctaaaaatggcagtgctacatccctcaccaaaggataaccagcttctgcttctgctctaactccacctttaccatattgcaaaaattgtttttctccagcagtctcattcctcttgcctaaatcgtgctttactaagcccttagtcatctgctggatcacttcaaattcaccttgattattattttcacaatagctacttgcacagccaaacaaccctaacgaaaaaatcgcgcctttatgggtatttatattatgcgttgtcttaaacattgctttttctgcctcaatgccagcttgacgcaattgttcaaacatttgccgcaaatcctgccccgtaaaatctgctccaattttagctgcttgccgaaaataattttctaaactcaaactgctattaataaacaaatacacattcatatcaggatgagaccccacgtcaactggatccactaaacctggcttaggattggtaactacttcataaagcaatgcttttagtgcgttttgtgtgatcttttctactgacattttgaccccatttccaaaatagctaaactaattttaacatgattatcctttcgcctaatttaaaaaaatgacacaataatattaggaaaagaagagagcaagttcatgaaaacagatcaatttaaaagctatcaaatagctgatattggcgattatttaaaagtattcgcctgcagcgcagtaatctcacagccaattatgtcgctggtcatggacgtagaacaaccggttcacacacaagatgtttttggcgttttttataatttagtcaaatatacggctccagcttttatttttggtattttgtataccacaatccgtactaataatgaaaaaaatagtttttcttatgcaaaacatatgcagacaaattggtctaatctttttgtacctactatttggtggacgttaatctacctagtagggatgccatggctgcaacaagttaaccattttaacaatcttggttcattctgctggcaattcattaatgggaacgccgccccgcacttgtggtataacacgatgatgttgcaattcatcattttaatgccgcttttctggggattaagccgctatgtaggacacaatctaactcgaggtatttggattgcagtaatcactttcgtactctattttgtctggctttggttctatgattacaatgtcttccatggcatgcacgaacatgactggtatttactcgaccgcatttttatttcattcttcatctatggtgtgtatggtgtcttagcatggcgattgcgtggttattacaaccagctggtcactaagttttggtgggtaattaccatattatttattgcttgcttcatttggactaatgttgagttgcacaagttcggttatccaatcaacttcaataatgcaccatattacaagccgtcaatgactctttattgtttagcagtaattgcactgatttcagctttttgcctgcatcaagttagaaaaaattcgcaaaccagtttaaaagtattccatttcttggctacttatgcttatcgcgcatatttatccaatgtcttctggaatcaattagtttggcgcggtcttaacatgcaatatcacgccatttaccacccattcttaactttctttggaatcttgctgttaacctggatcttgtcattcacttcggcttattgcttacacgtttggtggacgaaagcgaagagtttaattagcagcttttttcgttaattatcaatttcatataattcttctgcttctaacaaaaagtctttcatgaatggcagagaaaatgccactttgccatatcctgcatcaatgattacctgactatccattaatcgctgccgatattgcgaaatataattagaactttttcccatttgcttgcgaatatcacttatattaacaacatttttatcattatgagccatgatgaataaaaattttcgatcgactggcgataattcagagataatcttgatataagcattacgaaacagatcatttttaaacgatgagatcgaattttcaatactttcatctgttacctgatcagtagaatgttgccaaacatgatatcccaagtcttgaaatgcataagcgtaacctctagtcagcttagtcattttcattaaggcagtattattaatctctttattacctctttcaaatgctttttgataccgatacttaatatcgaaaagatcaagtggtcctaatggtacacgaccgcttcttaaaagaaatgttaatacatcattattttggagttcagaaacattcttaggcagcccagtcatcatcatattaattgaatacttttttaacaccataatttgatagatagacgccaaattaacaatctcaggagtttctttaacctcatctattgctatcaataaagattggtgatgcttttttaaaacttttaacatttcttcaagtaacacttgataagtagattgaggatttgatatatgaacttccaattcaaagccaaaagccgaaaactttacaccatcaattttgttcaacgccttttttactggattcgctgcttcttgataaatactttggatgagcgtggcaagcaaatcatttgtcatggctaagtaaataacaatccagttatctttttgttctaaagttgaggtaatatcagcaagtaatgaagttttaccaaccccgcgcatcccatagatcattgaagtttgatagggtccggtgccactttcaagtgatcttactatatcttctactattttttgtcgccccaaatatattttgggaactttgccaaagttagggtcaaatggattcgttatttcagacataattgatgttcacctattttcattattttagttgttggctttaattttatatctctttagatcttatgtccatttttatatctctttagatcttatagttataaaaaatgctcaaaaaattttgagcattaccattttatgagttatcgaaaaactatctcattaataaaaatttatatagtggcattaactgaattatcttatcttcttgctgaatttcagcctcttcaccatgagtaacgattattaagttttcaacttcatcaaaattatcagctaatttaattaggttcccaacttcacgttcttttgacgtatcatttacttcccatgcaacttgaattgcaattttactagctggtacataaaaatcaatatctatccctgtcttttgagattttaaataaaataaattctcttgatatttattatgcaacttgatcgcaactagattttctagtaatgctggcaatttatccagataaaacaaatttaaaatgccattatctgtaaaataatactttgggctgctttcacgctcactaaatttagcaaaataatttttggtggaaaataacaaatatgcatccttagcgtaatcgatataatcaataatcgaattgcgacttaccgtactaatcacattttttatatttttatacaaagttgcatatgaaacttgagactgtaaaatagtttgtgtaaggatgaatgattccttaaatttatttctttaaacattagaaaaaggagttcctttctcgtatgattggtttgaacaaaaaaaacacatacagaaagaagaactccttcatgaatgattttaccaaagattttgctcaagctctattcaatccagacaaaataaatgatttattgcgcaaagaactacaacaggctgttaataacttgctagaagctgaattgactgcctttctgggctatgatccctatgccagaaatggctggaatactggcaactctagaaatggtgcttatttccgcaaagttgatacgcaatttggcccaattgaagtgcaagtgcctcgggatcgcaacggtcaatttcatcagcacacgctgcctgactacaagcagcactcggatatcttggaaagcatgattatcaagctttactccaatggcgtgaccaccagggaaatagccgatctaattgaaaagatgtatggcagccattacagtccagctcaggtatcaaatatttccaagcagatgattccaaaggttgaggcttaccacaaacgcaagctaagcgacaagtttttctgcgtctatttggatgcgacataccttcctttgcgccgagaaacgtttgagcgtgaagcagtctatattgccattggcattaaacctaatggacataaggaagtcattgactactgcattgctcctagtgagaacattgaagtctggacagagatgcttcaaaacatgaagtccagaggcttgaagcaagttgaactctttctttctgatggtgttgttggcatgaaaacagccttggccaggacttatcctaaagctcattttcaacgctgtttggttcatgtcatgcgcaatatctgcgctaaagtacgcgtcgacgatcgtgaaaagatcatgaacgaattcaaacaggtgcatcaacagacaaacaaagaagaagccacagctgtcctgcatgacttctataccaaatggggcaaggtttacagccatgttatcagaagcttgaaagacatagaaccagatctgctggtcttttataactatcccaagcagatcagagcttcaatttattcgactaacatgattgaatcatttaacaatgtgatcaagcgcaaagctaagcctaaggcagagtttccaactgaacagtcgcttgatgcttttattggtattcaggcaatgagctacaatgaccgttatttcaatcgaattcataaaggctttggtcaggttcaggacaccttagaatcctactttgattaaataaataattaaaaaatcaatttacgagaaagaactatttacacaaaagatttgacagtttcgaaatttggtgcattactgtatcggcaatttttctaagtaataatgaaatcgtcttttcattacgaatcttattgcggacaatgatatcagctaaaaatacattttgataaatacttgttaagtaatttctcttgtctgttaagataatagattctggcaacccaccataacatagatattcatttgcggcagcacgaatttggccattattaactgtatccaagacggataatttatcatgtggaatttttttagcagttaaatattctgtaaaactaaaaggtgccacatatttggtcatatatcttccacccagccgcagaacaatatcatgacccaacaccttagagttactaccggttaaataaacactttcaccttgatctgctaaacgacgagcaaatttttcccagccagcaatattttgaatttcatcaaataaaaaataatgcttcttagttgttaattgattggctgcaattaagatattattacaatcagccaactgaaaaccatctaatcgttcatcttcaaaatttaagtaaacaatttgtgaccaatccacattttgtttattcactaaatcctgcgcccttttaaataatagcgttgatttgccagcccgccgcaaacctactaacacataatttaaactattttcaaaatgataatcacgaggaataatagcaatatttttaatattattctgaccttcaagaataagtgccgcaagtaaatctggattcatgttttgctcctatgtaatttatattaatcaaaataattataattttgtttaatatattaagcaaatattgcgtatttagagttagtatatttttaaattaaaaaagtccagctttcgctgaacttcccttcatttcttcttcggcacaaaggcaagagccaagagcaaattaataattatcaaaatcagtaataccataaatgtccacttagaaccgactgctgtgccattagtcagatatttattctgcgctagcgcaatcaaggtctcagctaaagctgttcctaaagcacctgaaaattgctgcaaagtattaaaaatcgcattaccttgtgcatgattttctttgcctaaagtgatcaaaccgctggtcatcaaactgccaaagcacatcccgtatccgccataataaagaacgtataacaagacaattgccaggttgcttaatggggctaaaacattcatcaaaatcaaactagcgattatccccataataatcggcagccgcgcaccctttttatcaaacagctttcccgctacagccgccattagcgcgttaattaccgcaccagggaaagtaacccagcctgctaatgaaacagaaccatgattgacagcctgaacatagattggaaagatgaagcccaaagctagcgttgcaattttggcaaaacaataagctattagctgcatactaaagcgtaaatttttaaacagtttcggactaatcaaagccgccttatcagaccaagatatttttagccaaattaataaactaataattcctagaattaagaagcccaaaacttgaattgagaaaaatgaatgtttagcaatccgtgtaaagcccagcattaaacagaccagcccaatagccaaagatagccattgcacatacttgaacttcactttttcaagcggattaatctgccgaattgaatagcttcccgtaaatagactcaagataagtcaactaccccagaataaattctggggcttggtggctggctcgttagcttgcgctaaccagaacaccaacttgcttagatacggacttgacttaccaacaataatcttttgactattgccgatagaggtcgtctaattaccaaagccttttgagtccgcgagttgcgagcggactgcagcctagcttaggctgctttttttattttagaattctgccagttgcctaagcctttttctaagatgtttactgccgcattccaatcacggatatgatgcgtttgacagattggacaagtccattctcgatccttaagcgttaatttcttataaccgttttgtcccataatactgccacattgatggcatctttgggtggtgtacttaggatcaattgttttgaactctttgccatataggtctgccttatatgccagcatgttcagaaaactgcgccagccaacatcagaaatagcttgagacaaggcatgattctttaacaggttcttgcttcttaattcctcggcaactactaaatcgtggtttttgattagtgcagttgagagtacttgcaagaagtcatttcgctgtctgcgaatcttatcgtgcagtttagcgactgctagacgctgtttttgataattcttggctaagcgcaaattgcgtccctctttcttagctctgcgctgcctgcgagacaagacacgttgggcatgggcaagcttctttttggttttgcgataaaatcgtggattagccaccattgctccgttagatgctgttaagaaattatcaagattgaggtcgatgccaatttgactctgcgtcttaggcaattccttaacaaaggcaatatcgctgcctagttgcattgataagtaaaactggtcgtcagcggtctttttaatcgtgactgtgccaattctagttgggatatgattaagcaaacgctctttaatcaattttctaaagctggcaatgcggacaacgcctagcttaggcaatttaacgtgcttagcatcaataaatctagctgtcccgttatcaagaaaggcttctgtctgtttaggatactgacagttggtctgatatgaccaatcactacgttttttgtgaaaagtcggaattccatgaccaagcttgcgatagttgttccaagctttctgatagttttgaatcgcattggcaatagcgagactgtcaatttctttaacgcgtaaaaagctataggcatcgcgaatgttctttggcttagccaataactcattattggcgactacttcttctgctagcttagtctcataattattaagaacagaaaaggcaaaaggcattacttgatattgtctaacagctaagtagcccttagcccgataattgttccgattacgtcctacataagagttgtagacaaaacgctgagcatcataatttagcttgatgattttcttttgtttagaactaggataaaagcgtactttcaagccaaaatggtaggctaaactgctcattctcttcatgtgtttcacctccttctgtagattagatatttatattttacaggaaagtcgaacatatgtcttcattttttaataaaaaaagctgaccattaggtcagcttggccctatccatccccgcattaaaatacggggaatttccgggcgtttttcattaaaaatagcgaaataatgaagatccagcgccaattaagtgcatcggtaatcattccgccaaaaactggccctaaggcaacgacacaggcagtaatcatagtgccgattcccatcataaagcctagtttttctttaggtacttcagccaagataatattgtacattaacggtaagccaatccccgtgccgactccttgcattgcccgtcctaataacaataaatcaaagcgcggtgataaaatatcgatgattagccccaaagtaaacaaaagaactcctagaataaaaattttcttagtcgaaattcttaatctaatctgtgagctaattggcacaatggtcgcaattaccaataagactagtgtgtttacccattgaacttgatcagtagtaatcgaaaattctttaattaacgttggaaaagtaactgtcgtggccgtttcatccaatattcctaaaaatgagagcatccctgccgacaaaatcgctaataccaagcgtggcgtaacttttttagccattttccatcttcttttctaaataacttcagtgcttttgatataagttcattatactgtttgtcgactgccgttcacaaaaaaataaagctcaagcaattctgctgagctttactacttaatatcttaattttataagccaaacaataacaagttctttccttctacattcatggagccatccttcttaagttgattcaatgaacgtaaaacaaaatctctttgactgccacgtaacttcttagcagctttcattgcagcgttaaagtcacgtttgttgtttgccttcttcagactggtatttaatctattagcaattcgcttgagtggcttaatcacaccttgcatagacttgctgtttaggtagtagtattgcaagaaagcttgagtaatccaagttgaatactttttatcctttgaagcgactacaactaaatattaccaatttgccgattatcttactgaattataaaaactaataagactatttaagctaagcgtgttatattgatattcacgttaacgttcaattttctaaaattttcaggttacttactatttattaatctatagagttccaaaatacctaaaactagactaaatcctcccaaaataaggtagtcatatatcgattcagaacgttctatctgtactattaatcttgcagcagaccaacccgtaaaaaatataaatataaacgctaatatgcctctagcaactctactagttaaaattcctctcataatacttttttatactcccatttaacagattgtagatgttttctatgagagtcagtataagtataggtcttccaagcataatattcataccctctagtgcaatattcttttatcgtataccatttatttttaggattctttccaaaaatatcattataaacagtataggcaaaaccgccggcagaaacataggggccaactacaggaacaaatccaagcaaaccaataataatatccttagtagttcctttcagtcttcttaccgtatctgcactatatttctctgtcgtcaaataataatactttctacctgcatgtttaaatgctaccttaccatttgcgtacgtaaaattaataaatggatcaaaaccacctacacttgtcgtaggtaactggctattatttatatcaactgaatatacttcctcattattcaaataaatagtatatacaccattatttgaaacaatgcgatatgaatatatttgaccgttatatttaatctttccagctaattttgaagaattatctggaagaatttgcatttcagttccatctgttagcttaacactctgccaagtgtatctactactttcttgactattctggctacttttagccgaatctagcatagaagcattaacagtattaggaactatcccttcccctgctgctaataacattgtagctgctatcaaagatacaatgcctttagatatacttctcacaatttcttccccctcaacattaaataaattcttctaacttcagttttatattaattttaaatctgtgctagaaatatcactaaaagctgaacaacaaaatattatcttcagccttatcaatattgccaacttttttcacttgattcaaagattctaagacaacttttctttgattagcaggtaatcttttagcagctaatacagcttgattaaaatcttgcttattccgaatcttctttaggcttgaagagtttctagttgtcaatttagacaatggcttaattacttgttgcatctttttagtattccaaaaatagtatttaatagaataacgcgttgtccagcaactatattttttatctttagagacaagcagatactgtggtgctccaccaaattttataacctttgtcgcataagcaactttttcaattctaaatctaacgtttttaattttcttccaactaactgattttgcgttagatattggcttagtagtagttaattgtttcttgtaattcttttgccctacataaatcttccctgatggggcttgaatagttaacacataaccttgttttgttaggttaggcttattaacaatatttgcgacgggtttgccactctcagtagtattggtatcagctacagcttgaacccgtttaggtgcagtcattaatacaccagtggtactagctactaataatacactagttactaatttttgaaatttcaatttttccactttccttttatttattaataccagttgtgagcctgccaaaatcttttagccgccgaccatgaaccataacgtcccttaacatatcgtaaggctgttttttcttgatttgctttgctataatttccgtttaaataagtatttgttaattgaaaacgcccaatatagataccatttcttgcattgtaatttccaccagattcacgtgcaataatccacatcttagcagctctctcttttgctgaaagactatcataatattttctctttaatgagcttggaactgaagtatctgatctaagatatataccaaatagtcctgacaaatcttcattttgtggaagatataatggcgtgccattagcaatggttttatctggatcaatattatcattcaacttttccaatacacttaatgaagtgttgtttgcttctgcaacttgacgaagagtttgattatcacggctagctactggcgtaatcaaattcttatctggaactgcagtatttgcatttacctttaaagtatttgtagttgcttgttgtgaactatcggttgtatcagcttgaacagccttagtaccaactgtgaatagcatccctgcaacaactgcagatgacaataataagtttttcttgttgaaaattttcattttcgttctcctcattaaatcaatgaatatcttgaaattcataagttacttactacctattcataatttacataaactatagtaatgcaatcctggagactgtcaagaagtttgtgtaaataatctctctcgttgattgacttttttatttatcttttaatcaaaataggattctagggtgtctcgaacttgcccaaatcctttatgaatcctgttaaagtaacggtcattgtaatccattgcctgaactccaataaaggtgtcaagcgactgctcagttggaaattctgttttaggcttggttttccgcttaagcctgttgttaaaggattcaatcatgttagttgagtaaattgaagctctaatagctggcggatagttgtaaaaggttaacagatcaggctcaacctgtctaagatctctaactacgtttttgtaggctttttcccagttttgatagaattcatgcagcacctgtacagccatttctttgtttgactgagtatgaatctgcttgaattcatccagtgctttttttcgatcgtcaacccgcattttggcactgatattacgcatgacgtgtaccaagcagcgttgaaaatgcgctttaggataggactggcagatagcctctttcatgccaactactccgtcagacaagaagagctctacctgttcaaggccgcgactcttgaagcctttgagcatttcgctccaaatctcaatattttcagtaggcgcaatacagtagtcaatcacttctttatgaccattaggtttgataccgatggcgatataaactgcttcgcgctcatgagtgacccgcttaagaggaatataggtggcatcgagataaacgcagaagaacttatctgacagatgtcgctgatgatatgcctcaactttgggaatcatttctttagaaatattggaaaccatagctggagaataatagccgccatacattttctcaatcaaatcagcgatttctcgggttgtgacgcccttggaatagagcttgataacagtttgctctaaaacatcagtatgccttttataatctggcatagtgtgttgatgaaactcaacgtttctgtctctaggaactttgatttctatttgtccgaattgcgtatcaaccttgcggtaataagcaccatttctagaatttccggtattccagccatcgcgctcataaggattgtagcctaaaaaggcagtcaattcggattcaagcaggtcattgacagcctgttggagcttttgtctaaataaatcattaattttatcctgattgaatagagcattagccatatctttggtaaaatcattcatgaaggaatctcttttctagtatgtttttcgttcaaatcaatcatacgggaaaaggattcctttttctaatattcaggaaaataaaattaaggaaatattcatccttacacaaactattttacagtttcgcatttgacatcatatttgcaataaaaagacagagtagtattacctgctactctgtttaattaatcaattatttttcagtatttgtcaattttatgcacataaaaaattcctaatgtactgtattccaagaaactggaactgaagtcaatcccgtggctacgcttccagtacttccatgtaagaattcagttactggcttgggtgccttgaaatgatgtgtttgaatatattgcgtaatttgataactgagtcgaccataaattgtttgaacagattcacccttctcggctttatcaattgcttcgtcaaacatgttaattaattctgcgtcatgctcaacttcgggcgtaaaacgtacttcctcaagtgcattttttaaagtcataatatctggtgaaaattctgaattcttatccttctttttgccaaacataattattttcccccctcattatcaatgagtgtaatcctctatctatgatattcaaagccataattttcctctaaactaaaaccaaaactgtataaatagctatatatgtaatgaaaaatattgataaatacgcgtggtgctagttaaatcgttttagttaataaaaaagtccaatcttgttagactcaacttgtataataatagaaaagagcctgatctgattgaactgccttaagcttaagcgttttagccaccatttacaagttagttttaaagatttagtgataatttgtcggcactggtatcgtttgtatgcaccggctgagtttactcatcggcgaaatattgatcaaattaaaactacggacagtctgattttggctttacttatctggcaagctaagacaggaattgaatcacaaagaagattctgtgaatgtttcaattgtttatcacactcacgttttaatcgacgttcacgtcagctattgcaattgatttatcagatacggcaagaaatgaataaaaaggttgacctgaatggacagttcttgatcattgacagctttccggtacctgtttgccaaccaattcgaaactatcgtgctaaaatttttcgcggttatgccaacattggttataaggccaccaagaaaatttacttctatggtttcaaagttcatgtcattgttagcgatgacggttacattcttgattatgtcgtaacaaaagcatcagttcatgatgccagggagacagttgaactgctggaaaatacccatccatctaattactatcttcttggcgacgaaggctatttaggcaaagaactgcatcaacagctaaaacaaatgggttatgaactttggacaccatatcgtaaaaatatgacaggagctaaaaagcacaatgatcatcaattgatggctattcgcagaacaattgaaagcgacttttcgcttctgacctattacaatgccgagaacaatcgagcacgtagtctgataggctttcaaagccggttggaaattgcaattttagcttataatttggcttattgtctagaacgatttaactagcaccacgcgttgataaatacttaatcatttgtaaataggtagtttgtttatccggatgctcaaaaaattgttttaattttggccataatattggcaacaaaaaacaactaaagatcaatggccattttgctaaaccaaaaagaacaacgataattggaaataataatcccgcaataatcaacgtcttaattattttaagagcatattttttaccagtataactggctaaagtatggcgcccattgtttaaatcttcatgcaaatcacaagtattattagctaactgcaaagcatagaaaatgagtgttaaaggcaaacatcttatcagagtagttaatgctaagttccaggtcaaaggataagtgccgtaaattgtgacatagatgcttactagcataatgaaatacgaaataaaaaaagataccactaattcacagatcggtgttgcattcagtggcttaggacccgcagtgtaaaatattccaatgaaatatcctacaactcccattattagtactggccagccggtgcgataaaccaaaataatacccggaatcgccgaaataaagtaactaatccacactaagtttctaacatcagttaaaggtaacttcagacgaccaattggatttatatcagtcaaaaaatgtcgatctttgccatgaagataatcatagtaattatcagcaatattaactgctaaatcaaacagaaaaacatctactaagcacagtaaaatgttaatcaaattaaacatgtgatattgttgaaacgacattgccgcgcccaagacaaaccaaattacatttaatggcgccgtataaatctctgatagttgataatatactggccaagataaaaccttcttcatagtaacttattaatcctcccattttttacttacatcttagtctttttctaaaacaaaacatagttactaattttgaagatattatcgcaaactactactttagttattaatagctttcattacaactgatgaaacttcaccactttattcttcaatgaaattttttgcacctcaaagccataagctggtaattcttttttataacgcaaaaaggaatgatctaaggcaaccccagcctgctggccaagctcatcaaaagaaagctcaaagtccccagccttattatctttgatatattgccataatttattatatttgctcattttctaagataaatgttctaaattagatttttcaacaaactctgcaaaaaatggcaacgccaattgtactactcctctttgaggggatgtaatcaattgatcatctaacagccttgcacgatagaccgaaatgtaattaataggcttgtttaagatatcttgcaattgttttgtcgtgacacgatcggttccagctttgattattgcttcgataaaatcgcgatcagttttggaaagatccatatacattctttcataggcattcctaaaaaggtccttttttgcagctcgaattgtttgtttcaaaacttcttcgtttaactgcaataattcccgactaaatcgccaagcataataaccaatcgtttgaaaggcataagcatagcctttaactgcacggctcatttcatccaataccatgaaatcaatttcacgttttcctttagtaaatgctttctcatagctattagctattgttttttcatccaacggtgataaataaacacgattactacatagtaaaaacgtgagggtattattcattctgtacttcggatattctgcttggcaatcctgtcatcaataatgaaatatcttattcatcaccaatcaatgtttgatattctgagccaaaagcccgaacatcgtcactaatttcaatttcatctattccgattagaattgacttaccctgcttttttaaacgacttagcaaaattgaaatatactcatcataatcaatttgctgtgattcttgtagtgcttgcccagtaattccctttcccataatattcaaacttttaacactttttaacaagtcaactaacgaaatacctgcaactcgttgcaaaccatgcattaattgaaaaagcaaatctccttgaccattatttaaacgaataaatatccaattatctaactcttctaaagatctttgaacatttaaaaggaaaactgtttttcttgatcctcttgtgacataaactaaagaagtttgatacttagcatcatgtgtttgcaacccagttaaataatcagttaaagcttcttgctgatcgataataattttaggaaaacgaccaaagttaggcataaatggatttaacatttttgcttccataaaagtctctttttatactttctttataattcaatacgcgtggtgctagttaaatctttctagacaataagccaaattataagctaaaattgcaatttccaaccggctttgaaagcctatcagactacgtgctcgattgttctcggcattgtaataggtcagaagcgaaaagtcgctttcaattgttctgcgaatagccatcaattgatgatcattgtgctttttagctcctgtcatatttttacgatatggtgtccaaagttcgtaacccatttgttttagctgttgatgcagttctttgcctaaatagccttcgtcgccaagaagatagtaattagatggatgggtattttctatcagttcaactgtctccctggcatcatgaactgatgcctttgttacgacataatcaagaatgtaaccgtcatcgctaacaatggcatgaactttgaaaccatagaagtaaattttcttggtggccttataaccaatgttggcataaccgcgaaaaattttagcacgatagtttcgaattggttggcaaacaggtaccggaaagctgtcaatgatcaagaactgtccattcaggtcaacctttttattcatttcttgccgtatctgataaatcaattgcaatagctgacgtgaacgccgattaaaacgtgagtgtgataaacaattgaaacattcacagaatcttctttgtgattcaattcctgtcttagcttgccagataagtaaagccaaaatcagactgtccgtagttttaatttgatcaatatttcgccgatgagtaaactcagccggtgcatacaaacgataccagtgccgacaaattatcactaaatctttaaaactaacttgtaaatggtggctaaaacgcttaagcttaaggcagttcaatcagatcaggctcttttctattattatacaagttgagtctaacaagattggacttttttattaactaaaacgatttaactagcaccacgcgtaattcaattttttattttatatttctttcccggatttaaaattgaagtgcaacactaagtgttaaacaaaaaggccatgaagacctaaacttgaagtgacgaaaaatcaagaaaggaagatcttcatgaccaattcaaattctagcatttctaagcactatcatcaattaaccagcgtacaacgtggacaaattcaagcaatgctggattccggcataacttcccgtactgttatcgctcaagaagtcggctgccataagtcgacaatcagtcgcgaaatcaaacgcggaagtgtcctgcaaagagacagcagctatttattgtatgagcactattacgctgatactgcacagatttattatgagaagcgtcgcaaaaactgctatcagcgcaatccattgaagcattatgctgtctttttgagaatgctctccagacgctttaaagctaaatttgatgccaccagcatcgatgaattcgttggtgaattcaaaaggactatgccaggctacccttgtcccagcacaccaactgtctatcgctatattgatcagggcttgctggacataagcaatattgatctgcctatgaagctcaaaagacgcaggaacaagcgtcatcacggccatagcggtcatgctttgcacaagaagcatcttggcaattccattgaacagcgtcctaaagagattgaagacagaaaaacgccgctgcactgggaaggagatctggttaaaggcgtcagacgcaagaatcagcctgctttaatgactttgaccgaaagaaccacacgctttgaagtagttatcaagattcctgactatcgggcaagcacatgcccaaggctgcttcaaaatgagattgacagacatcctgcctggtttaaatcgatcacgtttgacaatggctctgagtttgcggatatgaccaagatcaaaggctgccagatctacttcgcccacccatattctccatgggaaagaggcaccaatgagaactgcaatggacttctgcgtcaattcttccctaaaggcaaaagcatgaaagataagtcagctgcttatgttcaacaggcaactgatgccattaaccgcaaacatcgtcgaatccttcaatatcacacagcagaagaactcttcaagcaatatatttcctcatagcctaactgttgcacttaatttgacaattcaggttttatatttcttttataataagttcaattaagttatcaccaaatttgcctaaaaaaataaagcctagcaaacgctagactttatttaaataattatcaaatgattattcttcgtttaatgatgaacggtcgaatgaagcatccttaagttcgtcatcgatagtcttagtacctaaccaaccgatcatttccttcatagcatcggtaatagcttcagtacctggaagcaataacttacgtgggtcgtaacccttgttacccttgtctaagtccttgccagcttcgatgtattcacgagtagccttttggaatgccaattggaattcagtgttaatgttaaccttagcaataccaagttggatagccttcttaacttggtcttcaggaatacctgaaccaccgtgaagtacaagtggttcatttggaactgcttcagcaatttccttaagacggtcaaagttcaagcccttccagccttctgggtaaacaccgtggatgttaccaataccacaagcaagcttgtcaacaccagcagcaacgaatctcttagcgtcttcaactgatgctaattcaccaccatcagcaccttggttttcaccgatcttaccaatttcagcttcaactgaaataccacgttcgtgagccaacttgatgatttccttagtcttagctaagttttcttcagtatcaagcttgtgaccatcaaacataactgatgagtaaccaagagcgatacattccttagctgattcaaagtcaccgtggtccaagtttaagataactggaactgagatgttcattgaatccatttggtcagctaccatgtccttaacgaacttgtaaccacccatgtacttagcagcaccagttgatacttggatcaacaatggagttctagtttcttcagcagcacgtaattctgcacgagtccattccaagttgttagtgttgtaagcacctacagcgtaatggttcttacgagcatctttaaagatttgattaccgttgtcaaaataagccattaaaaaatacctcctaaatatcttacatgcctattgtaccctaataattgaaatatgaacaatttttcacagaatgtaagcgctattttcttattttcattgtttttctcttacatttctttaggagcattgacacctaacaatctaagtgattccgttaaaacgattgatgttgcttgaactaaggcgagacgagcaccaattttatcgtccttggttaaaatcttcacattagcatagtacttattgaattttttagctaaatctaaggcaaacttagctattactgaaggttcaaacttttcggcacttctagctacaattcttgggaaatctgctaaatctttggctacggcaaaagcccagtcatcatcaagagctagatcagtttcgctaggattttcacccatcgcagcagccttacgtaagacgctttgtgcccgagcattagtgtattgaacataaggaccagtatcgccttcaaaacgcacaacttcttctaggtcaaagtcaaaattgtctaaacgatcattcttcaaatcgtggaagacaacggcaccaacaccaacatcatgagcaacttgatcttgatctgctaaatctggattcttttcttgaatttgttttttagcaagtgaaacagcatcctttaatacttgatcgaggaagacaacgttaccttttctagtagataactttttaccaccttgggtgattaaaccaaatggtacgtggtgaatttcatcagcccagtcataacccatctttttcaaaacagtcttcaattcaacaaagtgttgggcttgctcgttacctacaacataaagcatcttaacgaagttatattctttcattctccattcagcagcggcgaggtcacgagttaagtaaattgaagtaccatcagatttaacgataatagcaggattttcaccttcacccatgtcaacaacttgcgcaccacgtgattcatgaagaagacctttttcttttaattcatcaattactggttgcatcttatcgttaaagaaagcttcaccattgtatgaatcaaaagttacgcctagttctttataaattcgcttgaagtcttttaatgaaacctcacggaaccatttccatagtttaactgcttctggatccccgtcttcaagtttcttgaaccattcacgaccttcattatcaagttcgggatttttctcagcttcttggtggaactttacatagtagtggaaaagattcataatcggatcttttttaacgtcttcttcattaccccagtgcttgtaggcagcaatcaacttaccaaattgagtaccatagtcacctaagtaattgattttaacaggagtatagccaaccttctccattgtcttagcaattgaattaccaattacagttgaacgaaggtggcccattgacattggcttagcaatgttaggactagacatatcaattggcacatttccttcaccaatcttttgatcaccgtaatgttctttttcagtcaaaacatccttcaaagtcgatgaaactaatttttcatggtcaatcgcaaagttaacgtaaggaccgactgcttggatattagcgaaattatcacttgataagttatccgcaatatttttagcaatttctgcaggatttttgtgcaaagtcttagccaaaataaatgctgggaaagcatagtctcccatcttagcatttttagggcgttcaattaatgcagcaattttttctttaggtaaatcaacttgactagcaaccaagtcaactacttcattcttaaagtccatcttattcctctcttctaaataaaaaagtctccttctacaaatgtagaaagagacgagttaaaaacccgcggtaccactcagattgatacaaagtatccgcttatttaaattcttgattttatcagtcaaacacgccttcattatcttctagtatctatcttgcaccaacatagactcgcttaaaaagaaaataactactacttttgacttcttggcaaacatgattatagcaggaaaaaacggcttctgccactaatttggttaaaaaaaccattcttgagttggattaaaatcttgaacgctttgaacaaagttttttactgcaattttttaaaaaacgttgcttaaaaagcaacgttcttgttaattatttttaatgattaccttcgtaccatctgggatgtgatccataatccacttagaatcaggtacactcaaacggatacaaccatgtgaaccttgagttcttcccaatttgactgcttcttttaagttatagctataatcagctttagttggcacagagtggaacaagtacacgttatcaggactccaactagtccaattattagctccttcacctaagttataattgaaaaagctgtctccacgaccattttggatcctaaaagttccagttggggtcaatgacttgcccttcttgtagattccaccagttgataacatggtatacaaaaccttgccttttcttaacaaataggtccggtttccttttaatgatacccgcaaagtcaaatccttttcatatggcttaatcttaggatattttttaggctcactctttttcttccaagtgcctgccttgcgcaagtccttaggatcgctatatggtcgatataaagcaccattatctacttttttagtttgttttttcttagttttatttattttcttagttttggccttagtctgcgttgtagcagcttcttgtgagacatcagacttaggtgcgcataccttagctaagccgataattgcaccaaaagctagaacgatactagttacgccgataataatgttttttttcataaatatgttaatcttcttttttattaatatttaactcaattatattatgctttttcgtctttgaagcgttaaaaaacatccctcaactagggatgcatttatttactattagaattttaacatgtttatgccaattctgaatactttttcatcaatttaggcaatactttagaaagttccgttggtcgtaccacataattatctttggcaagcaagtcacctgctaaagaatgaagatagacagcagcttgaacggtttcaacgcctgggccaaattgagcaaccatcccaccgatgattcctgctaaagtatcacccattccaccagtggccatgcctggattgccaattggattaacaaaaatttgaccagtcccattataaacatgagtatgattcgatttgagtactaaaagcgcattagtatctggaatcaattggtttaaagcatcaatactggcactatctgtttgaaacggaatacgaatttgactcaatcgttgccattccatttgatgcggcgtcaagattaagtggccagcattagttggcaataagttcttatcctgactaattaaatcaagagcactggcatctaagacaacggtttgtttttctgaagtacatcttcgcaagataactaaaatttgcttagcgagatcactcatgcctaatcctggcccgcaaactacaacatccatatttttgattaaatctgctaacttagcatcgcgccagttgataaacattgcttcaggcactcgtgcatgtaacggtgctaaattcaaagggtgtgttgcaacagcagtcaaacctgtgccagcattaatagcgccttcggtagacataataatagcgccaccatagttctcactaccaccgatcaagagtacacgaccgtaatcgcctttatgtgtatcgctttctctttctttaattacctttttcaagatatcttcagaaatttcagtcatatttatcttcctccgaaaatccagcgccaaattctgacaaaaaagttcaccttgttattagctgacaatgccttagccttgacgttcatcccattaggattagacaatgaaacaatcttttcattaccagatttaaattgataatcaccaactgtttgatctttcttaattggtgcttctacagattttttattcaatgatgccactaaagttttgccatcagctggatcccagatagtagtcttttgcttaagtcctaaattagtagttgcattatcaccatcaacaactttaattgtcttagcgccattcatttggctaccagcagtcattgttacaggacgatacttggtaaaaacataattcattaactttttagtttgttcaaatctagctggatccgttccgtcacggtgacgtgcgcccattactacagtcagtaaacgagcaccattgtgttgtacagttccgataaaacaagcccctgcagcatcagtagtccccgtctttaagccatcaactggataagcttgatcatattgagaaagcccctttaacatccagttaaagttagccatcttagttacgtgaccagcatctttaaagtttaagtgagctaagcgtgtagtttctaatacttctgggaatgccgagattaatttttgaccgacaatagccatatccttagctgacatcgtattttcagcatttttatttacaccaggatatgcatctttacctaaattgccattaggtaaaccacaagcagtataaatcttggcatcttcaatcccccacttttttacttgagctcgcatttgatcgataaatgccttttgtgagccagcaattgtttgaccaagcagcatagcagcaccattagctgattcaattaaggttgcttgataaagttgtcttatcgtatacgaatgtcctagttttaatggtacattcgaatattctgcattattagctacctttactatcggagccgttggctttactttctgatcccatgaaagcttatgattttttattgcttgcagagttaaataaactgttactaatttagtcatcgaagcaattggcaaagttttagtcgcatttttggcatacaaaatttgacctgaatcactatcaattgcaattgctgactttacatttagtttaacttgatcagcttgatagctactagttgtatctgcgctaactggtatagttgcaaataccgcaccacaagaaaaaattgatactgcagcaatcgtggtaattgctgcacgttttatttttttgctaaaaaacatgaatttccatccttttttataattaaagtattttatgcttacattttaccaaatatttggtatgattattcatgtaccaaagaaaattgcccgcttggcggaattggcagacgcgcagcgttcaggtcgctgttcaggtgactgagtgaaagttcgaatcttttagcgggcatcataattatgtgtaagtgttgagcaatcaacacttttttcatgcctttgctgtataatatatgtaaaagagatagaacagttagaaacgagttgattatcatgcaaaaaagacttacaaaatcacaaaataaaattttagctggcgttttgggcggtattgctaactactttgatctagatcctgcttgggttagaatcatcggtgctgcattgatattattcacaggtgtatttcctggcgttgccttatatattattgctgctatggttatgcctgaacctggtcaaagcgcacctaaggctgaaaagcacacagttgattatcaaactggtcgtcctaataccatgaatggtgacttcaccaagtctgacgatcaaaatcctgactcaactgagaaaaaggatgatcatgcagaataaatgaatgctataatataggtccttggcaggggcacaagttgatttcttcggaggtcaacttttttctcccaatttaatgtaatcgctttcataatacgcaattatgtggtacagtaacagtgtaagcaatgattgaattaaaagataaatattctaattatttatctcctagataaggagatgggcactatgattactatccttggaattacatttttggcacttgaattaattggagtcattacgttaacagcagttgaacataattaattctaaaatcttattacactcctaaaatttattgatatttataaaaaaggcactacagaaacaaatgatatgaaccccgaaattcggacaagaatttcgaggtttttattatgactaaattatccaaacaagacaaaattgatatttacaataattggaaaaattataatatatcagctaacctagctgctaaggaatatggggtaaatcgtacaaatttgttttatctgattgccttaatagaacgtcatgggatagaaattcttgataatagctataaagattactcagttgaatttaaagagaaagccatcaaaagagttatttatgatcatgaaacggctcgtcaggtatcattggatttaggactgcccagccaaggtatgcttcacaattggattcgcaaatataaagaagacgggtataatgtcattaatcacaagaaaggcagacctacccatgaaggacaaagacaaacagattcaagagcttcagaagcaaataaaagacctcaaacagaagaacttaagacttactgtcgagaacgaatttgtaaaaaaattgagcgccttagtctccccaagaaccgaaaaccaacagcacaagagatagtttctgcggttacgcaactaaggcaagaactccacgtaaccgttaagtttgtgcttgatacgattaactccaatcctgatcttccgcatttatcacgcagtaattattactacactttaactaaagatgataaagatttaaaaaacgaaaagattatggaacggatcaaagaaatatttgaggagcacaagcatagatatggctatcgtagaattactgcccaattgcgacgtgaaggcattatagttaatcataaacgtgttaaacgattaatgaccaagatgcatctatatgccattgcaattagacgcagatttaaatattcaagctacaaagggactgttggaaaaatcaagcccaatttaattaaacgaaattttaaagcaattattcctgatagacattggtactcagatattactgaatttcaccttaatggagagaagctttatctgtcgcctattatggatggatgtacgcaagagattgttgcttatacattaaatcgtcatccggtactaaaacaagtaatggacatgctggatcaagcttatcaaaagcatcctgcactcaatgggttaatttttcatactgatcagggctggcaatatcagcacgctgttttccaagcttggcttaaaaatcatggtgtttcccagtctatgtcacgtaaaggaaattcattagatgatggcttaatggagggcttctttggcattcttaaacgaaaaatgttctatggctttgaaaagacattcaaaaccatgggtgaattagaacaagcaatcaaggaatacattcattactacaatcatgatagaattaaaacagtactaaaaaaccggctctataatttttgtactgagacgtaaaaagtagacaattaaaatattggattaatagaggcttgacttcgatactctttcggggttaagccttttaatctgctctttatcctttcgttgttatagtattcgatatattcctcgattgcttgagttaattcttgaagattatgatacttgtattcttgatcatagaacatttcagttttgagcaggccaaagaagttctccattagcccatcatccatggagttgccctttctggacatgctttgagtaataccatggagttttaaagctcgctgataacgagggctttgatactgacagccctgatcagtatgaaaaatgcagttattaagagctgtttctttggcaaaagccttgtcaagcattgtcattactaaatccatatctggatgtttggagatagtataagaaactatatcgccaccgcagccgtctagaataggcgataagtaaagcttttcattattaagatgaaattcagtgatatcagtataccattttgtgttaggcagggctgcgaagaaatcacgatgaattaaatttggagctattttgccaatagtacctttatagcttgaatatttgcgcttattgcgcctgatgcctttaagacctaatttatgcatccaatagcgaacggttttctccgtaactttccagccctctctgattaactgcaaagctactctgcgatatccatagcggccttgatgatgattaaaaatctcatggattctagcaataagctttgaccgtttaggcttgacgggctgtcgtttgataatcttgtagtatgagcttctggcaattataggtagctcagggtgctctacaatcgcagctaatacataatttaaactaactttgaattcttgccttagatccgtaatcaccctagctatttcttctgatcttcttggtccaaggcacttagtttttttacgtattcgttcacaatacgcaatcgcaagttttcttctttcagctgctggatctctttctccagtttcttgcgagatttctgcttttctttggtcacgggcagggcgtcctttctgtttgataatgacattatacccgtttttcttatattctctaatccaattgttaagcatgccaatacttttaaaccccagttccaaagacagctgtaagtatggtttattgccaaagattgcttgttcaatagttcgctgcttaaactctttggaatagctttggtttttagtagttaaaatttctattccatgcatatcaattaatctaagcatatagtctaaattagctagattcattctgtacgctttagccaattgactgattgagatattttcatctttccatttatgataaatttctattttttgttctttattaaatttagacatagtaaaagacctaaaagtgtctaacttttagaaactgtcaaatcttttgtgtaaatagttctttctcgtaaattgattttttaattatttatttaatcaaagtaggattctaaggtgtcctgaacctgaccaaagcctttatgaattcgattgaaataacggtcattgtagctcattgcctgaataccaataaaagcatcaagcgactgttcagttggaaactctgccttaggcttagctttgcgcttgatcacattgttaaatgattcaatcatgttagtcgaataaattgaagctctgatctgcttgggatagttataaaagaccagcagatctggttctatgtctttcaagcttctgataacatggctgtaaaccttgccccatttggtatagaagtcatgcaggacagctgtggcttcttctttgtttgtctgttgatgcacctgtttgaattcgttcatgatcttttcacgatcgtcgacgcgtactttagcgcagatattgcgcatgacatgaaccaaacagcgttgaaaatgagctttaggataagtcctggccaaggctgttttcatgccaacaacaccatcagaaagaaagagttcaacttgcttcaagcctctggacttcatgttttgaagcatctctgtccagacttcaatgttctcactaggagcaatgcagtagtcaatgacttccttatgtccattaggtttaatgccaatggcaatatagactgcttcacgctcaaacgtttctcggcgcaaaggaaggtatgtcgcatccaaatagacgcagaaaaacttgtcgcttagcttgcgtttgtggtaagcctcaacctttggaatcatctgcttggaaatatttgatacctgagctggactgtaatggctgccatacatcttttcaattagatcggctatttccctggtagttacgcccttggagtaaagcttgataatcatgctttccaagatatccgagtgctgcttgtagtcaggcagcgtgtgctgatgaaattgaccgttgcgatcccgaggcacttgcacttcaattgggccaaattgcgtatcaactttgcggaaataagcaccatttctagagttgccagtattccagccatttctggcatagggatcatagcccagaaaggcagtcaattcagcttctagcaagttattaacagcctgttgtagttctttgcgcaataaatcatttattttgtctggattgaatagagcttgagcaaaatctttggtaaaatcattcatgaaggagttcttctttctgtatgtgttttttttgttcaaaccaatcatacgagaaaggaactcctttttctaatgtttaaagaaataaatttaaggaatcattcatccttacacaaactattttacagtctcaacttttaggtctcagtttattttagttatttaaatgactttttttgcttattatatggcgctttttattaattcattgtgtaatttttacattaatcgaatcctaaaaaaagtggctataatatctgttcacctttaatcataagattttacgtatatattgtatagttctaaattacactttatatacacttagcccatgattatgtctatgttatttaaatagagctcttattttctttcgacacctttatcatagatcaaataagcaattttggctgtataatttgtcttcatgctttaaagctgggaagaccacggtaaaggttgagcccttgcccagttcactttcaaggcggatcgtcccatggcactgctgtactgcgtgcttgacgatggacagaccaagtcccgtcccgccagtcttgcggttgtgggacttgtcgactcggtagaaccgttcaaagatgcggttttgcgcttcaagcggaatcccgatccccgtgtcagaaacccgcaaaatagcttgcccccgcacttccttgaccgcaatcttgacctggccgccaggattgttgtagcgaatggcgttgtcgatcaggttgtaggcaatttcataaaccaagcggaagttggccttgatttctgtatcggccaaagccgccttcagctcaatctcgtgcttgtcagctgacgcctgcaaggcttcgatcgcctcggtcaccggactcttcaggttcatccggacctcttcaaattccggattttcgtccaggtgagacagccggataatgtcatcgatcaaggtcaagagctgagctgaagattcatggatcttccggtaaaaggctggccgatcgtcttccttgaccaggttgttttccaaaagctccgctgaccccatgatggactgcagcggcgtcttcaattcatgggacacattggccgtgaattcgcgccggacctgctcttcatggtattcttctgtgacgtcaacgaccaagatcgaagtcccttttaagaccttccgtgaaaaaatcggactggcactaatttgaatgttgcgcccttctctttccacgatcccttcggtgtggacggtccgcttgtcttgatcgatgatctttttaacatcatctggcaaaacttcagaagactttgatcctaagagcgatactaccgccggattggacaagaggacctggtcgttcaggtctatcaagatcaggccttcttgcatggcatcggtgaccgtcttgaactccttctcccggtggtggagctgctccatttggtcagcaatctgcttgttttgactgtcaagccgggttaacagcggcttgatttcttcatagctcttgctttcaagcggctggtccaggtctaactggttcagcggcttgacgatggactgcgagatcatcttagctacgaaccaagaagcaatcacggcgatcagcaagatgatcagcatcagcgtcagcaattgcaagatggtcatccagatcgaattccgcgtaaccgccacccgaataacgccgccgtctttcagctttttggcatagtacatcgtaaccgtcgacagggtcgtgctgtagcgctcgctttgcccttcgccctttttcatggcttcagcaacttctttgcgcttagcgtggttgcccatcttggctgggttttcctcgttgtcgtagagtaccttgcctttagcattgatccaggtaatctggtaattttctccttttagctgggttaagtacttccttcccccattgttgaccccgctggctgccaaatcggcctgcgaagccaaggtgttgacctcattgtgatcatagtcgatgcctaaaaaaagcgcactcaaaaccaccgagcagaccagcatgactgccgttgataaaaagactgcccgaaatatttttttaaacattaattcccttcatggtagcgataaccgaccccgcgcaccgtttcgatatggctaccagcctcactcaatgtttgtctcaaggttcttacgtgaacgtccaccgtgcgcgtttcaccgtaaaagcccgtttcccaaatttgatccataatttcttctcgggaaaaaacggtccctggatgggtgatcaagagcttcaagaggccgtactctttcaaggtcagctcgatttcctgaccatcgacataaacctcatgccgcttgagcaggatcttgatcccgtctttctcgatcttgtcttctttcttgtggttggtccggcgcaggaccgccttgacccgggagaccatttccatcatgccaaaaggcttggtcaagtaatcgtcagccccagaatccaggttcttcaccttgtcatattcggctgtcttagcactagcgatgatcaccggcaattcttcagttgacgagttgccacggagctttttcaaaatatcgctcccatcttcatctggcagcatcaggtccaagatgaccagatctggatgcttttccgccagggccttgacaaaagtcgtcccgtcttcaaagccacgcaccttaaagttcatcgactccagcgtatacatttcgattttgcgaatgctttcgtcgtcttccacacaccatatttcagtcataaaaaaattctccctaatctatctgcaaatagctactctaattatagcttagaaacatttgctatgcagatagatcaggaagaatattaatttagcaaactttccaagacttatcttccggccttgccagttgccacaaacttggtccacttagcaacgttgaccgcgtggtcaccgatcttttccaagtacttggcaaccatcatcaggttgatcaggtattctggattgccatccttgctgaagttgttgatcaggatttctcgggcatggtcaaagtcatcgtcaacaatgtcgtcgcggtcgataaccgcttgcgccagttccagattcttggtggacaaggcggttacggcatcatcaaccatgctggttgaggtttgcaccatggacttaaggttcagctggtcattggcgatggacaggtgttcatttaacacgagttctgcaatatcagcagagatttccccaattctttccaggtcgtaaacggccttcaaagaagaactgatcacccgcaagtcagtcgcaactggctgctgctccatcaacaggcgcaagcagctgtcttcaattttccgttcgctcttgtggatgcggcggtgcaagttgactgagtcttcagcttcatggtagtcgcccgtaaacaaggtgttggttgcttccaaaatggcttcctggcacagcttgccgatgtcttccatggacttttgcaagttgtccaattcttcatcaaatcttgatctagtcattgtttctgcctttcttactctatctaattattactggtctttaaccgaaacgaccagtaatgtatctttcagttctttcatccttaggcatggagaagagttggtcagtttcaccgaattctaccaggtcacccagcaagaagaagccagtcttgtcagaaattctcacggcttgttgcatgttgtgggtaacgataacgatggtgtagtccttcttcagttgcagagccaattcttcaatctttgaagttgaaattgggtcaagggcactggttggttcgtccatcagcaagacttctggcttaacagccaaggcacgagcgatgcaaagacgttgttgctgaccaccagacagacccaaagcagacttgttcaaacggtccttcaagtcatcccagatagcagcttgctttaatgaggtttcaacgatttcgtcaagttcttgcttgtcggttacgccgtggatcttgggaccgtaagcaacgttgtcgtaaacgctcattgggaatggatttggtctttggaagaccatgccgactctctgtctcaaaacagtgacgtcaaggtcattgccataaatgtcggtaccatctaacttaactgaaccgtcaatccggcagccttcaaccaggtcgttcatccggttcaagcagcgaagcaaagtagacttaccacaaccagatggcccgatgaaagccgtgatttcattctttggaatgtgcatgttaaggtcatgcaaggcgtggaaatcactgtagtaaaggttcaagttttcgatagtaattttgtcttccattattaatttcctccgttattgcgcttacgcatcttgtctgaaatgcggcaggtaactaaagtaaagagcagtgcgagtactactaaaacagctgaagtaaagttggcaatttgggttgccttagggttcaaagccccttcagttctcatgacccagatgtgcagtgaaagagtttcaccacttctgaatggattcaaaggtgaagtaggtgaagtaatcttccagaagttgtgccagttgatgtaagtggattgaccagacgtgtacagcaaagcggcggcttcaccaaacccacgcccagcggccatgatgaccccagtcaagatttgcggcatagcagctggaatcaagacttttctaatggtttctgacttggttgcacctaaacctagagaaccttccttgtattcaattggcaaggcacgaattgcattgttggtttcagtagtgatcaaaggaattgacaaaattgagatcgtcaaggccccggccacgatgttccagctcattcccgtccacatgatgaaggccaggtagccgaacaaaccgattacgatggatggcagagaagaaagtgattcgatacttacttccagcatggtcaagagcttgccttccttggcgtattcagccaggtaaaccccagccccgatcccgattggcacggaaactaagagcgaaaggaaaactaagtaaagagtgttaaagaattggttgaagatcccgttgccggcagcccctaagaagtctgggctaaagcccttcaagccatcaaagataatggtaaatgtcaaatacagcaagaatgctagcatcagccagccgatggcgtaaaagacgccggtcataaaccgatcttttttcttagcacggttcattatttatccttctttccgttagccagtttgtgaatgagcacaatcaagacaattgagatgatgaacaagagcagcgccatggtccacagagccaggttgtattccccgccttgggcagtgttacccatgtcggctgcgatggcactcgtcaagttgctggttggtgacaaaaggtttgccgcaaatgagcgagtcttaccgataaccatggctacggctaaggcttcaccgatcgctctggccaagccaaggatcaccccggtcaagatgccgcctgaagctgctggcaaaacaactttgccgattacttgccagcgggttgcgcctaaaccgtaagcaccttcacggtagctcattggcactgacttaatggcgtcagcggaaaccgcggtgatggttgggaagatcatgatggccaaaacaatggatgcggccaaaactgagtacccacccatggctggatggaaaatatttttaatcaatggaaccagcttggtcatcccaaaccaaccataaacaacggatggaattgaaacgtagatttccgtagctggacggaagtacttttcaccgatctttggtgagatttccgtcatgtaaactgctgagccgatagcaaatggcaagcagataaccagggccagcaaacaggtttcaagagaacctacgatgtaaactgctgcaccgactttcccgccaaacaggccggtcttgtcaagcggtgcccagtcgctggtaaacaggaattcccagatgctgtggtgagccttgataaaggtttgactaccttggtagagcaggaatgcccccatcaagagcgtcaaagcaacaatcaagagcccgcaagcaatgtatactgcccgccagcgcttatcgctagcgatggctttttgaactaccttgtccatgaaaaatcactctccttttacttgtgttctttcttagccttgtctgaaagcttagaagcaacaccgtagcccatgccttcaacctttgattcgtattctttacttaacatcttctttaaaaaggccttaacagcagccttctttggttgacccttggtgtacatgtgctcgtagttccaaaccttgtatgagccgttgtaaacgttgtccagagttggcttaacgccgttgatggcaactgcagttacgtctgggttaccagtcaagtatgataaggcaacgtagccgacagccccttcaacgctttgaatcatttggatcaaagtaccggagtcgtcagtttccagtgattggtttgaacgactggcagtcttgtttaaagcatattgttcaaaagttgcccgggtacctgaagaagcaggacgtgagatcaaaacaatcttgcagtcattgccgccaacttggttccagttggtaaccttgccagtgtaaacatcgatcaattgctgggtggttaagctcttaaccccggcgtccttgttgacgattggggcaatcgcggtgatggccacttggtggtcaaccagcttggatgcggacttcttgtctaatttttcttctgcgaacaagtcagagtcaccgatgtcgatggttccatctgagacttgttgtaaaccttggcctgacccaccaccgttggtgttgatcacgctgtctggattttcatccatgaatgatttagctgcgctttggactagcggcaacagggctgaagaccccgcagcgttaacagtcccagagacacccttggtgtctgcctttgaactgccaacaacgcagccgacgactatagccagtagagcaagtgcgataaccactactctagttttcttgcctaacataattatcctccttgaattcttactaagtaaatagtaattaatggaggttaaatacattcagggggaaatgttaaatcaaagtaaaatacttaactttgtttaaattctggccggattttggaaaaatctttaccatttttcgaaaatcggttaatattctaacgttatttttcttagtttacattagcttaacaaagaaaaaaatgtaccgctttcacccttgctagttctatttaacatcggcttaacaatctttgaacctgatgcttttgttaattttttgtgagatatcacctgcgtgatgcattatgtaaccgattaaatctattcaaggctataaatagtgatatagttatgacatttgcttaagcagacaaaaagccagtggcatccactgacttttatctagctattcaattagttatttagttaaccgtggttgaccgcaaaggcgccgacccagaaggagacgacaaccaaaatcaagagcagccacaaaacaatctgccagatcaaggctagagtaatccaattcttcaaagggaccagattctcatccttgcgcttgataaagaggtagatggctggtgctaagccaaagattggccagacatatgcggcaaccagcagaaccaccatccaaatgttgtaaattggtgaatttgagtctttcattatctttcgctccttcactaattaagattttcccttatttctatcttaattatagcaatttacgctttattcttcactttctactacataatacctagcatgataatacattttttactggcttacttggcaatgtagacgtgttcgaagtagtaagagccgctgatcaaccagcaaggtgttttcagcctttgccagcagcttcatccacttgcctgagttgtagccattagtagaggtcatgcagtccaggaaggaaatttggtcggcaaagtccgcattccagccgctgatcgtggcttcaaagttaccagagtccatcttggcaaattgggacttggttggcaggctttgcaccttgacgtcgatttgcttgccaaaagttgattcaagagcactctggaagtattcgccgatggacttggacgtgtgccgtaatcaccgtaaaggacagcttctttaagccaagttccttcaacctttccttaaagtagctttgggccagctgcttgtggtggcccgttactagcaagctttccttggtttgagagaggtcggtaaaatccttgtcacccaccttggtcatgccagctgccgtaaagttcttagagcccgtgtagccgccgcccaaggtcttggctaaggcgtttctgtctagggccatggagatggcttgacgcatcttggtgctctggaacttcttcattttcaggttaaattggaagtaagtcgtcccgttggtctttcttacaacatagtctggtgacttttgcaggttcttggaggcttgtgagctcaggcttgccgtgtccagcttgccatcttggtagaggtagtaggccgttgacggagatttttccacggcaaagtggatgctttgcagcttaacggctttggcgttccagtagttcttgttcttgaacatggtccaggacaagttggagcccgtccagcccttttgcaagaatggcccgttataaacggtcgtttttgatgacgtaccgtactttgagccatacttttcaactgcggtctggttttctgggaaaaagactgagaaggccatcaaaagcttgaagtatggaatcttatgttccagactaacctgcagcttgtatttgccagcggctttcacgcccagcgtatcggccttctttttaccagcaacgatctggtcggcatttttaatcccagagaaaatgtagctgtattggctagctgtcttggggttcaccgtccgcttccaggaatagacaaagtccttggcagttacggtttcgccattagaccatttagtccccttcttaaggtcaaaagtccaggtcagaccgtctttgctgacagtcgtcttcttgaccagtaccttaaccggcttgctgtctttgcccagctggtagagcccttcagtcgtattttcaatctgctggaaggacgtggtgtcggtggctttggatgggtccatggtgatgattttcgcactggtcatccagtttaaattctgcttgacagatgctccttggctcttgccgcaggccgccagcatgctcccgcacataaaaataacagcaccagtcattaaagtcttacccttgttcatcttaatacctcattagctaacacgcataacaaaaaatcttcagttaacgatgccgccgataaaccgggtgtacttaatactgtgctgttaaattatctttgattcactttgtctaaaggacagttaaaacatgacgcggtttgctcttgcagcgacaccgctaagcctgattgtattaacagtcagattaatcatgctttttgcctcctttgctaaaaataattgtttttatacacatttcttgcgtttcttatgcattatataataacactaattatcgtctttgcaagagggagtggcagttttttgacaattagggttgattcacttagaaattgcacaaaaacttactcaagtaagccatcccccggccaaaaatttactcaactaccaggaaaaattagacttgacaccttatcagtaagatttgacaaagagccgcaattttttataacaaaaaaatcaaactgccatcacaacagtttgattttcttttatttatccatatgtagtctaactaaaatactttctaccttactacctaagacgctttggactaaccctgtcttcaatgtcaccaagccataaaagacaaccccagcacctacagctacaatcactagcaccaatgcattaaatctatgatcaggattgagaaacttgcctagtcccatttcacataatttaaccacaaggaacatgccaactgaaaatgctgtaactccagccagccttctactagttcgattcaaattaaaatcatactgcacttccaaatgttttaaagaaagtgccacaataattaataaacctaaattagtagcaaccagcggaccgtataccttaaataggaaaatcattggatattgcaggatcccttttaaaatcaatcctaaaaccaggtacttgatagccagtccatttcccgaaagaccttgcaaaatcgccatcagcaccgtaaataatcctaaactaatcgcggtaaatgacgacagatatagtacgttgctccccaatagatctggaccatagaaaactgtataaattggcctactgatggctgccatcccaaaagcagctggaatcattacaaataaaaataggtccatcgtattagcaatctgctttgaaatgctcttatagtctcccctagtatgcgccgctgataaaagtggaatcgcggttaccgccattgcactggccagcgaaacaataatcatgattaacttattagcattcaaaccaaacaaggcataccagtcctcaattgtatctgaactagcatgaactagactggcaatcatcgggtggaaggtatattggtcaaccaatgaaaataaggtaattcctgaatcaataataatgaaaggaattgcttgtgcaataatttcaccaaataattcagtcgttgagacccgcaagcgattattagaatgggcaaccaaataatctagttgttttcttctagaaaacaaaaaccaaattaataagccaattccaaataaagcaccaactgcagccgctaagtttgactgaataactgcatgaacatatgaaccatgttgcagtttcataattacaaacgccgttagcaacatccagactacccgggcaaactgttcaacaaactgtgacatcgcacttggcatcatatcggcataaccttggaaatagcctcgcatgatactcaaaattggaataattaaaatcgcataagacaagctacgcataactgcaacctgtcttggatcactttgactcccatttgaagctaaaagcggcgaagcaaaatacatgatcgcagctgagacaatacccaaaacggtcattaaaattaagcctttgcgaaataatttgcggccaatcccatattcgtttagtgcattatacttagctacctgcttagcaattgctcctggaattccggctgtcgagattaagataaaaattgtataaatgttataactacgcgcagtcaaagcattggcaatattgccgtaggagcccatccaggcataccacggaataatatacaaagcacccaaaattctcgaggcaattgagccaaaggtcatccatgcggaaccttttagaaaagtattttgtgtatctttgctatttaagttattttcttccattaaaattttcccaataaaagtctcaactaatcaattcaataaatctaaataataagtattcttattattttttaggaaaatctaacttatttagcaacaatattgacaatcttgtttggcacaacgataactttcttaacgtccttgccttccaagaacttctttacgtgttcaatttccattgcttgcttttgcaagtcatcttttgcagcgtctttaggagcttggaacttaccacgaagcttaccgttaacttgaaccataatttctacagttgactcaactaacttagctggatcataagttggccacttagcgtaagtaattgattcatcatgaccaaagacttgccaaatttcttccatcatatgtggagccactggagctaaaagcttaacaaagccttctgcgtattcccgtggaatggtcttagccttttgagcagcattcatgaagaccatcatttgactaattgcagtgttaaagtgtaatgattcaaagtcttcagttaccttcttgactgtttctgcataaaccttgtcaagttcaccatcattcttatcaacgattctttcttgtggaatggccttcaaatcaagatcgtttacaaagaggcgccacacacggtccaagaacttcttagttgaagcaggaccattgtcatcccagtcaattgatgcatcaagtggacccatgaacatttcgtacattctaagtgaatctgcaccatattcatcgatcacctcatcagggttaactacattacccttagacttagacatcttttcgtgattcttcaagattaagccttggttgtaaagcttctggaatggttccttagttggcacaacacccaaatcgtaaagaaccttgtgccagaatcttgcataaagaaggtgacgcacagcgtgttccgcaccaccgatgtaaagatcaactggaagccactttttaagcaaatcgtagtcagctaattccttatcattatgtggatcaacgtaacgcaagtagtaccagctagaaccagcccagttaggcatcgtgttggtttcacgcttaccttttctaccgttttcgtcaacaacatttacccagtcagtcaagtcagcaagtggactttccggggtaccagatggcttaatgtcagttgcatgtggcaagcgaagtggtaattgatcttccggaactaatgaagtggttccatcttcccagtgaataactggaattggttcaccccagtaacgttgacggctgaagtcccagtcacgcaacttgtagttaaccttcttcttaccacagttatggtcttcaagccattcaatcatgcgctttttagcttcttcattatccaagccgtctaagaactcagaattgaagtgcttgccattacctgtgaaggcttccttttcaatatcgccaccttcaataactgggttaactggcaaaccaaacttagtagcaaaagcatagtcacgatcatcatgagctggaacagccataactgcaccagtgccgtagctagctaaaacgtagtcagaaatccaaactggcacttccttgccattaactgggttaattgcataggcaccagtgaagacaccagttttatctttgttcaaatcagttctttcaagatcagacttagattcaattttcttaatgtaagcatcaactgcttctttttgttcaggtgtggtaatttcttgaacaagcttgctttctggtgcaagaactgtatagctaacaccaaataaagtatcaggacgagtagtaaagacatcaaaagtcttgtcgctgtcttttaccttgaaagtaacttgcgcaccttcagaacgaccaatccagttacgctgcatttccttaacgggttctggccaatccaaatcatcaaggtcttctaataagcgatcggcatatgcagtcatcttaagcatccattgacgcatattcttacgatatactgggtagccaccacgttcagttttaccatcgataacttcttcattagccacaacagtacctaagtctggtgaccagttaacaggaacttcagcttcatatgccaagccctttttatacatttgttcaaaaacccattgcgtccacttgtagtaatttggatctgaagtggttacttcacggtcccaatcatatgagaagcccaacttgttcaattgacgcttaaagttagcaatgttgttcttagtaacaacttctggatcttcaccagtcttcaatgcatattgttcagttggtaaaccaaatgcatcccagcccattgggtgaagcacattatagccttgtgcacgcttcattcttgcaacaatatcagttgcggtatagccctctgggtgacctacgtgaagtcccttaccagatgggaatgggaacatgtccaatgcataataattcttcttatcagggtcagtacctgtcttaaaggtatcatgctttgaccaataatcttgccatttcttttcaactactttgtggttatacaagataaactctcctttactatcaaaaaacgccctatgaaaaaatcataggacgaatcatcgcggtaccacctaagtttcacaaaattgtgacacttaattgctccttaacgcggatggcaacgctaggttttattaagagacgagttcacaattttattctaagacttcgcaccaaccagtctctctctgaaaaaaatatccttgttactacttctcgacctttattttcttatagataatgattataatttaccacaaatgctataaatttcaagaggggagtacttttttgattaatacgaaacgaccacctaaggacaccttaatacctggtatctgcttcgtggttatttatgctgtctgggccgcactggtttcatccggctcacaatttattcacaattttgataatgctgtggtcaacattgtttgcaacaataatccagctaatgtcgcttttgctaaagattttactaatctcggcaatacaagcgtgatcacaattgaaacaatcattgttttcatagttttactggtctttaagcaatatgcatacgcttggtttaccgctggtgtcatgatctgtgctaatggctataattggattatcaaacacgcagcaatgcggcagcgtccaacggtcaagcacttagtttatgcggatggttatagttttccatcggggcactcagttggtagcgcggcgctatttggtgttttgattatcctaaccattcttttagtgagaagcaaattctggaagactttattgattattatttgggctttattcccactgatgattggttacaccagaattttcgtccacgtgcactatccatctgatgtattcggcggttggattgaaggaattacctttgtactgcttggttattccttcctctatcacttctacattgagccgaagatgatcgacatgaaacgaaaacaatagaaatcaaagcaatttaaaaggcatcgcatgatgcctttttctttatcctatttttgcttgtaaatgcgtcttttgaaaaattgaaattaggttttctaacgctggcgacttttccccgcttttgctagtaatgaaaaagacaacatccattaactttcgatctagtggcaacaagttaattggcgtttgttccattcttctgataatacttgccgaagaaatggtaatacccacgccgtgaattgccaagttagttgcagtaataatactattagactccatcacaatatttttttcgagtcttaatctctgaaataagccattaacttgatgccggatagctgaaccaggtgaactcaacactaaaggctcctgcagtacctcttttagatcaagttcatccgaatttaagataaactttcctgcttggtaatatggtgaggctggcgaaatcactacgtaatagcgttcctcgccacccgcaaccacatctaaactcgagtcaagtgcttctggcgtctgaccaatataacaatccagctcgccattaagcagtcttctttcattttctctggggaaattttcaaatagctgaatcttgacgttggggttttcttgcaaaaattgcggcaaaatttctggcaataaatatgtacctaagctctccaaaatgccgattttaattatctgttggtcaggatgagtatatgcctccagcttgcgccctaattgctgcttattatatgaaacattctccaaatattgatagtaaattagacctgcaggagttaacgtatagggtctctcatctcggttgatgatcttagtgcctaattttttctcaattcgtccaattagctgcgttaaataaggctgggaaatatataattctttagctgctctggtaaagttactctcttttagcagaacatctaaaaaatgttgtaattcttcaggattattcatgatcaagcccccgttatctaaaaaatgatagcttcacagctatcattatatcttatcgactaggcgtttttcacaaagtctgctagttcttcttcagaaaattcattgccataatcttgttctaattcttgcaagatttgcttgggactgcgcttcatccttctaagcatgttaatcgttttatggattgctgcaacagttgcctcatgtatgccttcttccatgccaagctgctttgctgcttctgctacttcttctgtgttcatgacgtgttgcctccattcttcggttctacgataattgttcatcgactttttaattcgactgacgagttttccatttgaagttggcttgccttcaatcatgcgataaaggtcatcaagctcaggtctgatcttgccttttgttccctttgtgtttaaatatattatcgcagaatcgtcatttaattcaactgatgggtcttccttagcagtataaacaaaagtatatcgcttcaagccttttcctttgggatcaaacggcagaataaaaattacatatgcagcgtgcagctcgccatattcttgttttcgtcgtaaaaagccatcttccatcatcttgaacaggtattgcctggctcgtttatccatgtctgctttatgcgcgacctgcatttccacattgtaacgcctgcctctgctatccgtaatcaggacatcaagaatcgaaactttctcttcttggttaaaagcaatcctttcttgcgtgcatacagtgatatcttgaatgtccaaatgtggtagaacctcattcaaggacatacgatagatctctggatctctcataacattctgaaacatcaaatcatccgtaaaacctaatgcttcagacacatttagttctttctctttgctcatgcaaagtcctccttaaataatttgaggatatttatcctctattatttattacgcaaaaaagtcgcaaaattttttgggaagttagaaaagttactattatttttgttagtaagaattagaaatcatgggtttttattcgaaggtaaggaaaaaatgactccaaatagaaatacagacataccaatatttaaattgatatatctgtatttttttatactctatctttatttctgcgaagcgccagtaataacatcggtaacatgcttatcctcataagcagtattggcagcaattctaccaaaggtaaagatatctgctaaagaatttcctcctaaacggttaccggcatggataccaccagcattttcacccgctgaataaagaccagcgatgatttgaccgtccttatttaaaacatgagccttagtgtcgattactaagccacccatagtgtggtgaatagcaggtcttcttggtgtgacataaaatggcgcaacttcacactttagtcctaatacattcattactacaatcatgaaagaattaaaacagtactaaaaaaccatactccgatagaatatcgaaatatggttttaaataaagcagttcaataatatgtcccaaatttggggttcatatcaaatcaaactgaagtgattttttattctcttttattttcaattttagtgatagaagtcaaattgaccaatcgccattgtttctttaataccaccagtttcaagaaccgacttatcaatggtaatcttcttaagagttgctgcaaagtatcctttaaaagcatgccccattgccaatcctgcggcttctgaattacccaagttaactactacacctaagtcatggtaagcatatttatccggtctagtttgacccataattctgctcttaatatcttttgcagcgtagttagccattgaaagagccaattgaccagtgttaggatatggccatttcttaccaggaaccatgacgcttgaaacatcgcctaagacgtagatatcatcactttctggcgcggttaaatgatcaccaaccatgacccgaccacgacggttcttaaatccagatgcctcaattactggactgccactaaagcccatcatccagattctagtacctgccttaatttcttgcagctcagcattgtctttttcattagccattttatacaaaaccgaggtagaggttacttcattaacataagctggcttaataatttcgactttatttttcttaattgtgtttaaagcgtaatcaagcaatttaccttggaacattggcaaaagacgtggcgaaccatcaatcattctgatggtaatttcatctggttgggcgccagccatttgagctagttctgggcgaacctttgcaatggcatttcctaattcaattgcttgaaaacctgccccacaaattactactgacaggtgtttagaatcatggtcttggcgataagctttcatttcgacataaaggtggtcgcgaatagcttcagcttgttttacattgctcattggcaaagcattttcggttacacctttaatgcccatattgctcaaggtaaagcctaagccaacaacacaatagtcatatttaagtggagcatgatcctttaactcaactgttttatcagcaatattaactttttcaacttcatccgtaatcacagtagtcatcttcggattaattacatcattaatttcatatgacatcccagtgtagggaatttcaccagtagccacttcatataagcgaattgtttcgtagtggtatggattacggtcaactaagataatcttaacttgttcacgcaacttcttttgcaaagcgacaactgttttcaagccggcaaaaccagcacctaaaactacaactgttttcataattttcaacctctctaaaatagaattcctaaaaagtaagttattaagtaagtcagtgaaccaactagcaacgtttttactcctgtgataaatgtctctgtcttaacttgtttaccaattaagatcttgttctgcttataaacgaacggtacaattattactgttaaccaaaccgtcttaggagcaattcccaaaaacggtaggaggaagattactaaaaatgctaaaacatttttgatactaaaagcaatcaagccaccttttttaccaataaagtgaataattgtggtgcggtgattatcctcgtcctcttgggcatcgcataagttattagctagcattaaattagaaatccataatttatcagctaaagctaataagaagatacgaccgattgtgatccagttccaatcaaaagcttgaaaactattgatataaacactgagcagtacaatcatgaagcccattgtgaaaccagagaacaattcacctagtggcaagctggaaataggatgcggaccaaatgaatataaataaccaaccataaaacagaacaagcccatccacaatacaggcaagcctactttagcgactagatacaaacctaataaaattgcaataagactaaaggaaataattaatcccagaactaaattaggtgaaatattttctcgcccgataatgttagtcttctcttggtaattcttgctatctgcgtgataataatcacagtagttatcaaacatatctactaccatgttaaatagtagcattgcaatgaagaagactagggcaaatccccagttaacttggtgataataatacacgctgtagcacatccctaagaaaaagggaatgacactagcggtttttgctttaatctcaattaattctaaaaatacacttaatgacatcgatccacatcctttcaaaggatcactattctgttaactctattataaggaaatctatcatgaataactctcaaccttggcaaaaatatccacttattcgtaaaccgcttgaagaagttaatcaattaattcaggcaaccatccgcactccatattcagacttgcaagatgcactccttgaaatggctagtaacggtggtaaatatttacggcctagtttactaattttgtcagctcaaattgctagcaaaaaagaaactgtatcaaaacaaattattcaacttgcctcatcaatcgaaattttgcatatggcctcattaattcatgatgatatcattgacgattctgacgagcgccgcggtaaaattagcatccaagcccgttttggcaaagacaccgcagtttacgctggcgacttgctttttacgcacttttttgacctaattttgaacgccatttccgaacaagattacatgatcaaaaatgctcacacaatgcaccatttacttgctggtgaattaggccaaatggctgaacgttttaacctaagccaagatttcaacgactacttaactaatgttaaaggaaagacagctgcactttttcgtttagctgccgaagaaggaagccattttggcaatggagatgagcaaactactcaagctttagcctcctttggtgaaaatttaggcattgcttttcaaattgttgacgacattcttgattacactggcagtaagcacctgaacaagccaacgctagaagatttgactaccggcgtctactctctacctattctgctagctcttagcaaaaaggaattacgagagcaattagtaccgctacttgaaaaaaagcgacaaatgagcaaaaacgatatcgaacaaatccaaaagattttgctaaacagctcagtcattgaagaaactcatgccttagctgaacaatacactaatcgggcattagctaacttagcccaactgccgcaaactaatgcgaccgtcttgctcaaaaagatgacgcgtaaattagtcaatcgaacgctttagtctttgcgtcccaaatgaatcgcacctgcaccgtaagttaacttagtaaccgctactcgagtaaaaccattttgctcaagtagcttttttaattgctcagccgagagaaattctttacttgtttttgacaaatactggtagtccttgatattaccgtgtgtcaacttagcaaaatacggaaaaattttaaaataagcttgccagcccaatttaactaatgcattagtgggctgagacatttctaaaacagcaaattgtccgcccggcttaagtacgcggtagctttcctgaatcgtcttaacagcgtcagggacattacgcaggccaaaacaaatagttacacaatcaaagctattggccgcaaaaggtaaattcattgcatcccctgcaatcaactttatcttggactgcagctgcttttgacgaatctttttttgggcaatcttcagcatctcctggttaaaatctagaccagtcactaatttagcttttttagtcaaatcaatagttgaatcagcgctaccacaacacaaatctaagcaaatagaatttttatttaaatctaactgccgtaaaaatttcttacgccaactcttttgaatccctaaactaacaatattattcatcaaatcatacttaggtgcgaccctagtaaataggtcatgcacatcttgttctggcactttattcgttagcataatgaacctctataatcctaaatcagcctttttcaattcacgataacgcggctctgtctgccataatttttccggtgtaccctgcatattaatttgtccatcttcaataaaaattacttgatccatctgatcaattccttgcaagtggtgtgtaatccaaattaaagttttaccggataattccttaataaacatattaattacagcttgctccgtaattggatccaagccaactgttggctcatcaagtaagacaattggcgtattcttcagtaagattcgcgctaaggctaaacgatggcgttcaccacctgaaaagcgtaatcctgcctcatccaccttagtatcaaggccatccgttaatttttgcaccatctcggccaaacctactcggcgcaaaacgtcccatagctgctcatctgtggcatcttcattacctagccgcaaattattggcaatcgtggtattgaacaaatatggcgtttgattgatgatgctaaagtaattggacatttgatcgccaaacttgctggtatcaattccatttaaagttacgtgtcctttagctggtacccgatcacctctgagcaaggcagctaaagtacttttacccgcaccactacgacccaaaatagcaatcttttcaccatcatggatatttaagttgatcccatgcaaaacctctttattagtttgagggtaggcataatgcacatcagttaatactaaattaaacggtgcggttaatttgattggtttatgcttagtccgatcaggagctggcaaattattcaaacgcttaagcgaatctttgtagatattcgtctcttgagcagcagtcggcaaactggcaaaagcctcaacagtcgggaataatgccaaagcaaatgccgcaatccaattagtataataagttgaacgcccgccaaatctggcagcaccccaaattactaggctcacaattaccaacacccagaagatttgtaaaacaaagtcgcgccagcgatcaaattttttcatcttcgcgttgatttgcaaaaatttatcttgatcattgacatgcaaggccaagtattctttgctgcggccagacaaaatccagtcatctactcccatcacattatcagtcaaatcaacgtagagcttgtcttgaaccgttttttcatagctttgccgcgcaccattgattaagactgaccaaataggaatagcaaaaataatcaagaaaaacaggatcaacatccaaatgcccatcagtggggaaatgatgcctaagccaattacgataattgcatacaagccccaagctacaaacattggaaagatcgttcttaggtaaaagttttgaatatggctgacatcatcagacaaaagtcccagaatatttcctagctgatacttactattaaaaatagtcgcatcgcgctccaatgagtcataaagctgttgtctaaatttggaggtcattttgagcacccaattgtgactaaccagccgctcaaaataacggacagctggccgcgtaatcccaaatgctctagttaagacaattggcacatagattaacaaaatattttcaggtttagctgctgaacggctgattaaatagccagcacagaacatcaagcccccgccacagacgaaagttaaaatgcccagtgcaatcgccaaaatcaacgttttacgatatttttccaaatatgggcgaacccaacgatcattttttaatgctcttaaaaccggaatcttattgatcattgttttcacctctcattcctgccattaacttgcagaagtagccttgattttgctgcaattgctcataacttccttgctcaaccaattgaccgtgatccatcactagaatatagtccatttcttttaaccaatgcagtctgtgagtcgcaaagaagaccagtttattttgcattaatggcatcatccgcttctttaagtcaatttctgtttcgatatctaagtgagcagtcggctcatcgaagatcataatttttcgcttaggatccaaaaatgctctcgctaaggcaattctttgtgactgacctccagacaagacacgcttaccgcggccaatcaccgtatcaagtccgttaggcaaatcatttaacaaggcatccagacccatgatatgaatcgcctgcttaatttcatcatcacttgcctgcggattataaaaagcaatattttcacgcaagctcttagtaaaaacgtatggctcctgcggaatataggtcatttgacgctgccaagcaggaatattcatggtcgtagttttctgcccttgtagttcaatttgcacttgatccggagtcaaaaagccgctgagcaggttaattaaactagttttaccagatccgctcattccgataatgccaattttcttgaatccttggacttgtaatgaaaccggtccaatttcggttcccttttgataagtaaacttcaagttcttgatcttcaattgatcttgagctgaccaagtttttaaaggtaaatcattagttttttcctctggcagattaatcaattcgttgatccgcttaaaggcatttttaccattcaaggttgcatggaaatcccccgcaaaatctcgaattggcaaaaaataatctggcgccagaatcagaattcctaaagcaggaaaaagtgcaattttaccattcatcaagtcaaaaccaagaaaaacagcaatgattgcaatagacaaggtagtgaaaaagtctaaggcaaaagttgaaagcattgctacttttagcaccgccatcgtcttttttctaaaaccctcactcaagttaaaaattgacttggaatatcttttactcaggcctaaatacttcagcgtatcaattccccttaaagaatcaataaagttattagataaaacctgaaagttaccaaattgtttaattgctcgatcctgtgcagcatgacctaggataatcatgaataagacaattaaaggatacatgactagcagaatcacagctgatgtccagcttaaaaacagcatgccgacaaagattaaaactggcacaatcatcattgttaaaactttgctgtagattaacttaatgtattgcctgacctcatcaacaccatctagggacatagtaatcaaactaccggttccttgtttttgtactaaagcctgtccatcacgaaagactttatttaaaagctgctgtcttaattcttctgcaacccgaccggaatatttttctaacattgaatctctcagtgtgctgatcaattgtctggcgataaagcaagctgcaaaagtaattagtagtagccaatcgagaggttgacctgcccacaatttgcttaagactgacgctagtgccaaggcttgtcctactataaaaaaagcttgcagaatctcaagccctgcaagtttttttaagattgaaccagcgccatcaattttaaatagctgtttatcaatcattatttaacctctccgattcttggcattgaaatccgcttgcgaaaaatccaatatgcccagatggtgtaagccaagacacatggtaccaagatgcaagtagcaacagtcataacaatcaaagtgtagttagatgatgatgcactatgaatcaacaaatcatatttactgctgattgatgaaatcattactcttgggaataaaccacagaagattaaggcgaccaatgagatcaacgttaatccactgcaagttaaagccattccttgcttgttagtgaaagtagctacatgtgctgctacagagaaaccaacaattaatgctaagcatactaaagttgcaattggatgtactctcatgaagtcggtttggaaaatcaataataaagcaaagacaacttcaccgacgtagagtacccagtataaagcttgtgcatagttttgtgctctatctgaaataacgcccttagttttaatagtaatatagtttaagccgtgcaaatagcaaagaagtgttaaagcaataccaccaacgattgagaaccagttaaagtagtcaaagaagctagctgaaatattgcctttagcatcgattggcatccctttaatcattgagataaacattaccccaaagagaaaggtggccattacgctaccgatcgccattgcattatcccaaatatgcttttgatatggagcacattttgctctaaattcaaatgacacaccacgaataattaagccaactaagatcaataataaaattaaatagtaacctgagaataaggttgcataccagtatgggaatgatgcaaacattgcaccaccagcagtaatcaaccaaacttcattaccatcccaaactggtccgattgtcctaacaacttgatctctttcaggttcattatgagctaaagtcttcacggccattcctaccccaaagtcaaaaccatcaaggaagaagaagcctgagaacaatactccaattaagataaaccaaagtatttgtaaaaatgacattttaaatggccccctttgagaacggatcaactactttgcttgcctcttgagccttatcatattcatctggatcgttgtgcatgaagcgaacaaccaatgcaatcatgataattgctaaaatagtaaataagcagaagtaaacaatatttgatgttaaaagtgaagccactgaaacattcggtgaaacactttgatcaatagtaaataatccataaactgtccatggagcacggccaagttcggtaattaaccaaccggcagtgttagccaagaatggtgagaatgtaagaagtgcgaagatccataatagccaacgatggttataaagggtttctttattcttacgagtcatgattaaaccaacaattgccatcaagaataataatgcagcaaaaccacacattactctgaaggaccagaataaagtattaactggtacatagtagtccatcttgcgaccatcaatatgtgtaccatacttcttttcaagttctttgttaatttcttccataccttttacagaaccagtagtcttgtggtaagaaagaatacttaacatgtctggaatatcaattcccttaacttcatgggtctttggattagcaattgcaactaccgtccatggagccttttctccagttgtcttataaacagcttcagttgcggcgaacttcattggttgatcatgcaaagtatattgcatttgcatatcacccacagcaatttcaccagctgagaaaattaacattaagattaagcctaaacgcattgtcttacgatagatcttcttgttaatgtctgaaaggttacgtttcttcaatagttggaaagcagctaacccagtcaaaattgtagtaccagttaaaagtgcaccaacaattacgtgaccatattcatacattaattgtggattcttaagaagtgctccaaagtcagccatttcggcacgaccgttgcgtaaagcaaagccgacgggatgctgcatgaaggagtttgctgttaaaatccataatgcagaagtcattgtcccaaagacgatcatccatccaaagaataagtgtaatttcttccccactttatcccaagtaaacatccacaaaccaataaaggtagattcaataaagaatgacaacaatgcttcaaaagcaagtggagcaccaaagatgtcccccatgaatctagaataatcggaccaattcataccaaattggaattcttgaatgataccggttacaacaccgacggcaaaactcaataaaaagatattagcccaaaacttggtcatctttttatattcaggcttgcctgtatgaacatacattgattccataattgcgacaacgaatatcgtaccaattgaaaatggcacgaagaaaaagtgaaagatcgtcgtcatagcaaattggaatcttgctaaactagtaatatccatttttacgcccccataattcctactcgcattacaagtctctgccaaaaataacgttcgttattcagctcaatttaagtgtacagctacttagatttactttcaaggaggcaaataatgcgctttcaatagtgttatcttatttttaggccactttccatttataattatagcattgtcaaatatagatttattccaaccgcaaaaaaagtactaaaaaaggaccaaactggtcctttttttctttatttttattattttcatcatgaaaatatttttgattttttaaaatttatttagttgttattttatagattctacacttttaattgattagtcaaattttgcgtagttttcattttcatatttagttcttttaaatttggcgaaataagactcaaatatagcaagctagaagcaaagatttctgcaaatagtgaattaacagcgccgtaacgcaacaatttttcatttgatggtaacgcaattatagtatcagcaatatcctttaagggcgaattctgggcacgagttactgcaattattttagcttgattttctttcgcctgttttgccattagcagtggttcttgagttaatccactataagaaaaggtaattaaaatatcttctgtcttaatattagctacttgctctaaagcaatgtgcgaactttggacgaaagcagcatcttttccgctacgaattaatttgtaaaataaatcctgtgcggctaagccagatgcaccctctcctgctacataaatcttctgtgcggctcgcattaattgtaccgctgaagctagagattgatgatcaattgttttgccaatgtctgcaatatttttttctaaactaatctgtaatttgtaaagcacactggtcggctcatcattttcattaataattgtatccaccgtattatcttgcttgccaggtatttcttgtgcacaagctatttgaaaatctttaaagcctttgaaacccaattttctacaaaatcgaatcactgatgcgccacttgttttagtaatagcacctaattcctgcaagtttttacttaggaaaagagttgaatctttaaaataaacatcagcaatcaacttagaagttttattcaaattaggatatacatctgaaatcttatttgccaaattaagcataatatcacctttcttctatgtcagccttctaaaaatgattttcgtactcgaatcaataaaatcaagcaacttcacatactcaggtgaaataaaaccaatcacattactacgtgcttcaaaaggtaaatttgacttaatcagactaacttcaccactatatctttgagctaatttgttttgcattgtaatagtgcctttacgcctatttaaagtattacaaattggaatatcaggttttctaggcaaacttaagcgaatcagcttttctggcatgtcctttcttacttcaatcacttgatcatacagctgttgatattgtggcaatagcgaacattctatgtttaaaatattatctttttgataatctacaatataccgaagatttttgattgatgccttgctatcgccaataaacacatcatccacatttgcttcatgaattaattcaacagctgcaacgtaaggcgaaactccacgatgcttttctacagttggcaagccttcatatagtgggaaacgtttaagtgcatccccaggaacaaaagcttgagttcttaagccatagtcctttaacatccaattcttacgtttaaaatctgtccatcccatacctgtatctgtatgcggataaaaattatatgttaaagctaatttaccaaaatcaacccctgcatttctggcacgatctaaatagtccagtgacacaacacttgcatttaataaaataaagaaatttctttgtagctttttgattaaatcaaagtcatcaaaaccataatctaatcttaaggccttgaatcccttatcttttaaggcttcaaaatcgcctcctttaattcctagcttttccaatgtagccggagaaacatcaggaattacttcaagtcccaattcatcgcacaattcaaaaaatctcggtaatttttgatccagatctgaataatcttcttctggaatctgaagtgacgtaaaaacgtattttgcaccagcttgagctgcttttttcaaatagttttcatcataatcttggaaatatacagatattcctagcattttttcttctccgttaaaaataaaaatcattgtaatagttacaatgatttcaattacttctttaattttatcattcaggaaagacttcattaattcttgcttcatctattccaaagaaccatgttaaaacaaagccacctacataagaaattaacaaagcaatcaagaattcaacctgttgacctggctgcataattaacagtccaaataatccagataccccctgtgagacagtacctaaatggaataatgatgctgcaacaccaccgaaaccagcaccaagacaagccgtaataaatggacgtcctaatggtaaggtcacagcatacattaatggttcaccaactcctaaaatagctacaggaattgaactcataaccatatttttaaaacgcttatttttgctcttaagccaaagagcaaaaccagcaccaacttgaccacctccggccatcattaaaataggaagtaaatagttaattccatgagttggaccagtagggtcattcagcataacatgaattggcgttaaagcttgatgcaaaccaacagatactaatgctaagaaagttgacgataaaatataaccgccgaaccagcttaacttatcatataagaagtccatagccacgtaaataatattggttagccaaccaccaactggttgtaagaaaaccactgaaattaaaccacaaaagatcagggtgcaaagaggtgttaagaatgtatctaaagcattaggcataaactttctaatctgtctttctgtccatgcgataaagatccccataaacagtgcggtaagcaaaccaccaacaccagcaacatatggcttattagtgaatggcattgatactgccagtgaatttaaagggtacgcagcaaaacctgttaaatttaaacagaatacaccaccaattccacctagaattgcactacctttaaattctttagctgcattcatccctacaaagattggtaagaatgcaaatagtccccatcctattgttttaatagttaaataccaccaatcattggcaaaagcactaccagattgataatcaataacattgcagataccattgactaaacctgcagcaataattcctggaagtaaaggaataaaaacattagcaatatgatgcaatccacgttgtaaaggcttatcatgtttagctttttgtgccgctttatttttttgagctctagctttaacttcatctaatgtttcattggaatcatcgccgccttcttctccaagtggcacaccggctaatttactaaattcagttccaactttagtaacctttcccggtcccagtacaacttgtaaagtttcagactgaactactcctaaaactccattaagccgctttaactgatctaaattaatttttgaatcatctttaacactaatccgtagacgagtcatacatgaaataactgcggaaacgttgtctttaccaccaatatcattcaaaatgctactggctaattcactatctttgctcattttttacacctcctaatttaaattatctaatgcccattgataagcttgtggagctgctgaagtccaataagcccaattatggttgccaccgttgtctcttacaaacttaacactaatgtcatggtttttaagagttttcacaaagcgatcgacattttttactggaacggtagtatcacttgaagtagtctctacaaagaacttatctttctctgatttactattaatgtacctagttggaaatacactatcataaaatttccaatcccagttactttttccatcttgaaaagcatactgtgaagttttaattgggttgttattcggcaagcggtaccaaactgcaggagaaattagaacaccatttccaaaaatatctggatatttcaaagccaatctggcagcaccatatccacccattgagataccaccaatacctacatgtttaggattggtttctgtcttatacaatttattaatagtagggaccatgtcatcaacgatggcactttccatctgcatcccaccttgcttttgattaatataaaagctattaaagccatcaacaaaaactacgatcatctttttattacagcgatgaatttctccatcaagaatttgttgagaattaaatctttctagcaagtttctatgattaccatagattccatgcaacatatataaaacaggatatcttttactgctttttggattgtaacctgctggtaaatatacatcataattccaatccatatgtaattttttcgaatacatagttgttgtaacaacttgactcttatgaggtgtaacagccggagtagctgtagcctcttttttctgactgcatccagttaagcctgctcctaaaagtaaaactgaaagagcaactaataaaaaattgcgatgtttcattattctccctcccttacttattactaatattcattagcaaagtagtattatcaaaactcttttgaaaaagcaatcactaatatgcaatttttgtacaaatagaaataatatttcattattctttattagtaagcgcttacttaaatataaaaatatcacttttaagacatataatcaatgatttttgaaatttaatttcaaagtatagctaattatttaaaacttggctgacattgttattatttttttctaatagtttacttgcatcatcactatttaaccctgtttttgccataacaattgctaatcctacatttttatcagctttaagcaagacatctttcgcctgctctattgatacgttagtaactgacgtaataattctaattgctcgatttactagctttttattagtaggcaagacatcaatcataacattttgataaacttttccttgtttaatcattacgcccgttgaaatcgtatttaagatcatcttttgtgcagttcctgctttcattctagttgatccagtaattacttcaggccctactacagcttcaatagctatttctgcatgttttccaattaaactattattaacacaggcaattgaaattgtccctgcaccgattttttgtgcatagtctaatcctccaataacatatggagttcgaccactagcagctaatcctagaactacatctttactagttaaatttagcttacctaagtcttcagcagcaagtgattctgaatcttctgcaccttcaacagctaaatacattgcagttttaccgccagcaattaatcctattgcacgatcagggctaattccatacgttggtactaactctactgcatctaatatacctaatcttccactagtgccagctccaatatatattaatcgtccaccatcatggtatttcttagaagccatgtcaattgcctgagcaatttgctcctcctgagttcctactgcttcagcaactttctgatcttctttattaatagttttaaccatatctaaagttgacatattatcgatatgcatagttgcactgtttcttttctctgtagttaaatccttgatattcatattaatcattcctttcttttaatttttcgagaagctttcctgtagcctccatttcttgttttacctcacctaaatcacttgaaattgagcataaataaagcacatttgaaataaacatttgagcaaaagttgaatttatagcaccaactctcatcagcgattcatgatccggtaattttaaatttatatctgctaatttactcaaaggggattcggattttctagtcactgcaacaattggtgttttattttttttagcttgtttaactgcaagtaatagttcctgagtcaatccgctataagaaaaacatatcatgacatcttttggcgttgaatagtatattctctctaatgcaatgtggacatcatcattataaaaaaccgtttttccacttctaatgagtttataaaaaagatccttagcagaaaagcttgaagccccaataccagctatatacacagctcgactttttttaattaaggatacagctttttgtaaatccttgatatcaatagtcttagataaatcttcaaagttttgactcaaactaacccttaatttagtcataacttcatcagctttgtcatctttagttacaatcatatctattggcttaagttgtgactgtttgacagtactttgagctaaatcgatttgaaagtcctttaaccctttataatttaattgcttacaaaaacgaattactgatgctgcagatgtattagtataattccctatttctttagcatttttatttaacaaaatttttggattttcaagtaccgcatcagcaataatacgtgatgatttttttaactctgtataattctctaaaattctatctctaacattcatttaatcaccttgcttttaactctattttactttcatagaaataatatttcaatatatgtagatataataaaaatactgaaattaaatttccagtaaaaaagccacatgctctactttgcatgtggctccttcaacttaatttttcttcaattttcgatctcgatacaattgattcaatacaatcgagactacaataacaatcatagaaacaacgtaaacagcttttaacccgcctaacaaaacttgccgtaattgtggcactacattggcagccagacttttggcattttctgcagaaacaattttattcatcatttcttgattcaaccccgatctcttgcttaacccatgcgccaacatcgtattaaaagcaatcccgtagatagaaaccatcattgtctgtcccagatacttcatcagcgtattaaacgaagtggcaacgcctatgtcatccttaggtaccaaaacctgcgatctcacctgtgaagctgtcgtaattgccccaaaggcggtcccattaaaggcagcaataacacagaagacccagaatgatgtgtaaatcggcactaaaatcaaaaccaaatcggccacaactaaaaccaataacatataatcatatgtctttttaatcccccagcggcctagcatcccgccaattaagaacgaacctacaatccacattaatgaactaggcgttacagcaaaaccggctagagatggattagtaccattaataccttgcatccaggtaggaatgtaaaattcaaagccgattactacgccagaaatcaataacgtaatcaggttaattgcaaggaactccttatcttttaacatagtgagtggcattattggatcaactgcgcgcttttctgctctaaagaacataattatactaattaccactaaaacggctagagcggccattatggcgatattagtgtttgaacctaaatcttgtaagaaaaacatcaaagctagcaataaaattactaaccaaatggttccctgcaaatctaacttagacttagagctatgtttaggctcttgcaaacaaaaaattacgagcaaaaaggcaattattccaattggcacattgatgtagaaaacccagtgccaggatagatgctgaactataaagccacctaatagcggtgcaataactgatgctactccccaaaaaccagagttaagacctaacattttcgctcttttttgcagagcatataaatccgcaataatggtgatggcaactggctgaaccgcgccagaacctaatccctgaattactctgaataagataagctccaccatattttgtgcaagtccacacagcgatgagcctatgacaaacaacgcaattccaaacaaaaaaactggcttccgcccaatgctatccgccagttttccatataaaggagttgaaacggccgtcattagcaagaaaattgatataacccaattcataatctcgagcccatctaggtcagaaactatggttggcattgcagtagaaacaattgtcccttcaatggcagtcataaaagttgtcataaaaatcgcaagcgtgactataggcacgtttgtttttttcattcttttttactttctctttttatttattgcttatttttaatataatcaagcaaatcttgtgttttatcagtcttttcccatggcaaatcaacgtctgttctaccaaagtgaccgtatgcggccgtttgttcatagattggacgacgaaggtcaagcatcttaatgataccggctggacgaagatcaaaaacattgcgtactgcttcagttaacaaatcatcgtcaaccttaccagtacccgcagtatcaatcataattgaaactgggtgagctacaccaattgcataagccaattgaacttcacagcgataagcaaggccggcagccacaatatttttagcgacataacgagctgcataactagctgaacggtcaacctttgttggatccttacctgaaaatgcaccaccgccgtggcgagcgtaaccaccataggtatcaacgataatcttacgaccagttaaaccagaatcgccctttggacctccaataacaaaacgccctgacggattaatcaaaaacttagtcttttcatctaggtacttggccggaataacttccttaatgactaaatcaatcattgcccgatggatttcttcattagaaacttctgcatcagtttgagtagagataacaacagtatccactcttaatggcttattgtttccatcatattcaacagtgacttgagccttagcatccggacgaagccaatctaaagtatggtcttttctcaaagcagcaacacgtctcattaaacgatgagcaagcgaaattggtaatggcatgagttcaggtgtctctttaatcgcaaagccaaacatcaaaccttggtcaccagcaccaatttgatccaattcatcgttatcagacttgttttctctagtttcaagtgagtgatcaaccccaccagcaatatcaggtgattgctcatcgatgtcaaccatcacagcacagttattgccatcaaaacctaattctggacgatcatagccgatcttcaaaatagtcttccgcactacatcttgaatatcaacataagcgttggtagaaatttcaccaaagacaaaaaccatcccagtagttacgatcgtttcacaagctacgtgtgaattaggatccttctttaacatcgtatctaaaattgcatcagaaatctgatcagcaactttatccggatgtccttcagaaactgattctgaagtaaacaaacgtctttccatattagtccccctatatagacattggctattcggttacaaggcatcttcactaatcatagtgaatcctctcaggacttgaaccgataaaataataattttgcttgttcgttctttttgcataaaaaaagactaccgcggcggcggtagtcccgaacaatggaggatacagggctcgaacctgtgacctcctgcttgtaaggcagatgctctcccagctgagctaatcctccattagtgacccgtacgggatttgaacccatgttacggccgtgaaagggccgtgtcttaaccacttgaccaacgggtcatatctcttaatcaagagcactttattataataactaatcatgttttaaaagtcaagaactttttttatttatttttattagttattaccaccgtgatctctcaatcacaacgtttattatattacctgatagtccctaattatgcaatagttatttttaaaaaatttcaaataatttttgataattcgctttcatccagtaataataactaattccattaggcattgtttcccttacatcgagaactggaatattatgttgctctgctagtttaaccatgccactaactgtactacttgatgcttgaatattattaacaaagaaagcaatttttctagctttaattttgacttgcatctcatgaataacttgcgcactcggatccgtttcattttttacagcttcttcaaatgcctgattgccaatcttaaaatgacaccgttctagtgcataatcaaacacgggctcactaacataaaccggtttatcttcacgcccattaattttagcagcaattttctttatactatcaatcttttgcaaatagcttgcagcattagacttaaaatatgctgcatgttttggatcaattttacttgctgttttaactagataatcaacatactttttaggcatgtttaagttataccaaatatgaggattatccccctgttttaatcccatcaattgattaccaactttaaccacatgaatatcattagcattggctaaattagtcatccagtcatcatatcctagaccgttggcaataacaatattagcattagctacttctttggcagagccagtcgtaggctcaaaatcatgtggatctgtatcgccgttttttataatagcttgtacatgaccatgtttaccaactatatttttagcaatatctgcataaatattagtagaagttacaatattaactctatgcttagcagtattctcttctccctttgtcgaacaagcggaaaatgttatagctaatagagatattaaaaataaaaatggaattagttttcgtagcttcacgatatttcctccctttctccattatatatgaaaaattaggtagaaaaaaaggaactatgttaacatagttccaattcatatatatttacggaatgtgagggatttagtaacgatttttattaattttttccggttcttttttctagatttatgcgtttttagtttttactaattcatattaatttttaaattggagaccttttcggagaccctataaaactttgtggctcttaacatctattttacgtgaaaaataaagccgcccacaaccaaactgtgagcggtttttgtttaggtcaaatcgacttgaaaattctgcattgcaaccaaaatttattatagcacattatttattctcattttggcagttttctaagatcatgcaacttagctagtaggtgtaccctctcccatgctattttttaacttttcaggatctgcacgccaattttttagcgtttgatttggaccgccttaaagctatctataaaatcaggcgactttacaagcaccaaaaaagcttatatactgaatctaaccatatagacagtatataagctttaatttgccactagtgttactccctagtggctttttttataagttaacgcaagttttcggagaatttcatctaaaaattcagacggtacactgcatacatacttacattctctggctttcgaccgagaatcaattgaacgttcatgatccagctctaccctgccgtgaactggcaaaccttctggaatttcaacgtgtagtggaaattctttttcgttagtagtaatagcaaccactttgatcactcctccacacatcatattgaaatcatcgtttgacacgacaagcgctggacgatagcccgcttgttcatgtcccttggttgggtcaaagttcatcatgataacatcaccttgatggaagtcttttctgctgttcaaattatcacctcccttctaataaggacttctaaattaaaagacttcgcgcccaactggtccgccccagtcctcttctttggacttgccaggattttctttttcccagtcgctccaatattttttatagtcaaagcctttgaaaagctcttttaagctttcaggctctttttgttttttcaaaacgatttcattatttttgttaactgttacatcaaatttggtcggtaattcattgatgccggctttgcttaaaatagttttaggcagtcgtacggctagtgaattgccccattgtttcaattccacattgcacattgttataaatctccttacaagtcttaattaaacctttttatttagtatatacttttgtatctacatttgcaataaaaattaaaatataacgcaaaaaagccaccccagaggaacaatcccccgaggtggctttatgcacgacatttggagcttttacaactccttttcttttttattatggataaaattacggataaattatagctcattatggctatctttgtaaagtttacagcacgatatacgcacggttgcccgtcacatatacctgcttgcctttgtgtagctctttaatctttaaaaagcgtccgactcttccctggatctcgacttttgagttaagctccaagccgtaaaccttgcctgcgtcagcctttggagcgtctagtgcatgagtatgaggtaaaacaaccttagctactgcatgtttgctgtcgttatatgcgatagggttagccttcacataaacggcacgaccatcgaaaaactgatttttgccaacttttacggcaccgttttccaagccgaacacctgccacatggaaccacacggttttagcttgtcgctttcccgcttgtccagtttggagcttgtgtaaacgtatgctccctttgaattggatactactgcgacagcaccgatattccactttacaacgggatgcagagacagcgattctccggtcttgtttgttgatttaggcttagaactacctgaatttgcctttaaatcgatcaagcagatattgccgtcaacgttgtaacccttgtaattatcggtaaattgccagattgctacgccgtccattgatgggaagtaattaaagtcagcggaatcttgacgacccatgactttatatgaagctacccagagacaagttccgaatgatttaacaattcggctggtgctcaaatgatttcgtaaattgaaagcacctgaatagacaagtggcttgtatcctgcttctttgattacctgcattgcggcaagaacagcatcggtgttggcactagcaccgccattgactgaattgccagaaccttcttcccagtcgtcagcgatgtagctaccagctgggactccgtaagccttagccttttcaacggcatacttagcttctgcccgtgctcgtgtgaccgagccggaatggttggcatagaaatagcccatggttagcaagccatgagcctttgcagatttaatttgcgcttttgctttcgggttgatgtatccagtaccttgcgtaagctttacgatagcaaatttcgcacccgtgtagctaacgttttctttctggaagctggctacgtccacaccatagcttttctttgatacgattgagcttgacatctttttcaccgcctttcgtttggttttcaaacgatttgtcaaacgattcaaaaacgtactcgttatacgtcttagttcttgtcatcattgtcgtcacctgatacaaagccaattggttgggcgttggtatcttgtgtatcctcttgtttggcttggtccgctgtcatttggtcataagcatgttggacagcacccttggcgactgtttcggtcactggcttgttttcttgcttggcttgatcaagtaaggcttgtacagccttgaccttcttttcggcaccagaaatatccagcgttgcggcttcgcttacgacaaacttagcaatctcatcaatggttattacttgctttggaagtggtttagccgactttttggcaaagtattcgatactagtagagataccgatacagatagccacgatagccaaaacaactatttgtgtgtaagcagttaattcagtgagattcattattgggtcaccttcttagtagtaagtacgccgctagtgatgtcgcccgtcttagcaggggtgtagcctactggcttatcctctaccgctggcttggttgcgtctgggtccttgaccatggtttcgtcttggatacctgacaaatagcgcacccacttggtaactgcacctttgatgtcttgtggcacatcgtccaaggttaaaacaccatcttgcacaagagtggtgtagtctaaaattctagtgtttggtttcattttcggataactcctttcgcaatttttcgttttccctgcgtaattccttattttctttaactacagcctcatagtcgtctactaaaaagctatggctgtcttgtctcgtatttctcttatcacttagatatgaagtaaacaaccccaacaggaatggagctagtacactaagtacgtctttaagaccttgcaagtgtatcagctcctttctcagtcctgtgggtcatactcataagcaatctgcataaggttaatgattgcgtagatctcaaaaacaatagcagggtggaatctgaaatagccggctccaacgatgtgaaagctttccgcaaccagcagaactgtcaagaatgctactgacacgcctagaccaactttgatgattaactgtacccgaatatcaaaaacaccgcacaaaatcaaaattagtcctgccatcaagccgatactatcgacccagacgttattccacgcaggtgctagacttggtgggtaaaaaaagtaggttcgatctatcagaaagcagaccgccaatgccgagattaacagccctgttttgatgaaattccagcgactaagcttgtggtgcaggttgagcttgcggtgcaacatagtcttcacctgtgactttcttgtaacctgctgcgtccaataagccttgttgaactaagccttgaaagtaaggcttttggaaaagccccatttgatagtcaagtacccacatttgtaaaaataaagcgtttaaatcagtcataattagttacctccgttttcttgcttgttagtgttttctgctggcttagtgtcactggttggtgtagcagtcttagcttgatctgcttgcatgccaaccagaatttgttgcattgaagccataaccttgttggcttgttcttgcccttctgcgaccttttgcaagccttgggtcaatgctaaggattgttgtgtttggacttgttggctttgttgcatggccttcattgcttggtcaaacttatcgttggcttggtcaagtgcggcgttcttcttatcaagttctgcgctcttcttatccaattcttcaatcttttgtgtagcttcttgcaagattgcggcttgaccgtccttggagttttctacccagccattaaccttcaagtcccagacaggatcttttaagctgtcgtctggcttttcaatgtgccagtgccatggaagttctggcaactcataaggcaacgtaattactacgtgatgcatttctgcgttgacagagtcaggatcactaaagtaataggtaaaccccttgttttcttgtgtagcgttttcttctgcgcccgctactggtgcaacttgtgtgttttcatcagccattttattggctcctttctattaaaaaagcccacgggaactccccgtgagcaaggctaattttttgcataaaaaaagcactcaatgagtactaatactataactgttcccttgataaatacttagtcatgatatccgatgctttgataagcggtgtgtatatcccatcaccagtattaggattatttatccaatgatcaacgtcaacaatataatatggaatattatgttgatctaccacaacgcctgtgatttcacccgtagaagctaagccgcctatttcatccggtttattccattgaatcgaattactattgatagaatagctataataagcattaatgactccctctctagaccatcctattttatatttactgcaagttatcgctctgccaattaattctgtatttacataaccgacaataatttttgttgtagggtagtagtcttctttattaaacttcatgtgatctagcatacagccaccgcctttctggtggcggctctaagtacttggtataggtggattaacgggctaattacccccccctaagatttccgtacagtccgattttcgaacccatacaggaccatagacggtgctactatctcctttacagataattggcaaatctatacttctcccgactaaataagcggtatttgaagaggcacatacatccagctccaaatctgcgttcagtaaagagtaagtagtatttggaaaatccgtaaaaacggtgcttgttgaagttcctttgggaattttgacctttttagggaacataagataatcatttttattgaagatcatcttttcgatcatagaaccaccacctttctagtgatagctctaaatgcctgacataagcggattagggggggtttaccccaccatttcaagttgcgagcttgtgataccagcactctgtaataaaaaccataagtctcatttcccgcgcctaagctataagtgtcttgcgtttcaaatttgtttgtgataaatgcatttattcttctgtcatacccaacgatttgaaaattaatgctttgaacagatttgccagggttaacagctccgttatcatcaattaaaactgacccagatggcaaatatccagatgtaggtagaaaactagcattaaagttgccgttttcgtccgtcaggcttcgccattttttacgatcaaatagcatatgatctagcatgtttccgctcctttcttaaatagagtgaaagcatactcaaccattgacgcaatagtatgtagaaggcttttacccccccatattacatttctaacatttgttttttcaactacgcccgtgtaatagtaatgcgaataaactgcattattaggatgcttgttttcatcactatcagcgtaaatttcaagttgtccatcaaagaaataaacgtcttgacctgccccaacacaggtaacctcagcatcatttaatactcgccagccattacccgtattcgggtttttgatcggtgtttctgccatgacagtaaatcttgatggacaagcataatagtttttattattagctgtaatagcggacatatcgtttgaaatttcaaaccacttttttacattaaaaattagatgatctaacatgctttcacctctttctatctatctatttttcaatcatcgcaatatcgtttggattgttgttttcccattgctgggcttgtgcctcttggttggctgggaaccgcttgccttgcaggtagttttgtttgatgtagttgatttgattaatcaagtcgttaacttggttttgtaatgtggtaatcgtattaagtaagctattaatatccgacttccaagcgatgtcttcactccaaactggtccgttgccattaccgccagtgattcgagcttgattattatgataaccaacgcttagaacgcctttcgtatctgcgccaccaaagccaacaccagcagcaaaatcattcaataatggacctgatccacctgcgtcaattctaatagacgttagtacgctattaggattaccaaccccaaaaatatcttgccaactatttgagttttgaatctctctaaacagtggtgtagctatgttgtgtttggtgttgatctgattttgtaaattagagatgtcgatcatttttgccatctgtcgccagggttgccagttattatcaaccttcattcgataaaatggagagtcatcattatcagggtagtaagtttgaacaattctatgatcagcgccattagaaattatcagcgtaccccagatgcccccacaaggggaatttttccctttttcagggtttgtcacatagtaaggacctgaatcggtcaaactatcaaagtctggcgaatttgcggttcttgcaccttttaagttgttaacttgactctgcaaattgtccgcccttgatgtagcggcattttttgcatcttgtacttgggcgtttacgtttgattgatctgccttggtgccaatctgactaagcaaaacgttcactttattagcagtccagtcatctttgtaaagatcaatagtgtaagtgccatcagtattcttggtggctttccaggtatgatcttgcgtttgtccttggccgtctaagtactgcttgcggaacctgatctttgaaaaatcaattcccgcaatttgggcgtctaccgtagccttgtcagccttggtatcaacggtttggctcaacttattaagactgtcttgacttgccttagtgttggctaaatcggtaacagtcttaatctttgcatcaacgtcagtcgtatcgtccttagcactaagcaacttatcgacatcagtcttgctataagtcgttgcttggtccgctttggttgctaaactgtcattgactgccttaaaggatttgtcaacgtctgccttgttagccttgtcggcaatcaacgctgtcacttggtcggcgctgactttgccattggtgtcggtcgatagggctaaaagcttttcgtccagttgtgccttgctgtaactgtaatccgtaccaaccttagtggctaccacatcactaacagccttgatcttggtatcaacatcagcgttcttagcgtacggggtaaagtcgatttttgcaatctcggcatctaccgtggctttgtctgccttggtattaattgcatcattcagggttttaacctgcttgtcgatatctgtcgtgttggctttggttgctaactgacttttaacggcttcactgtcggcttttttagccacttcagcgttagtttgatcaaggttagattgactagccttagtatcaattaaagccgttagaacctgcttagtttcgttgattgcaccgtttaaagttgccggtgtaaccgatgcccccgggtcaaccactgccgtgacattggttgcgtcgccaatcgcaattgctactttaagatcaagagcgtcagtcgctacgccatccggtcgggtagctgctaggtaagcccctgcattagcaaccgcaacaatgattagcttttcgtcctcgcctttcttagcaaaaaagccaactgccgtgtaaggcaagtcagctgttaagccgtcattctgaaaagtggcttcaagcactaccgttgtgtctttgccgttgctttgtttgtcgctaacaccaatcggtacctgttttaaggggctgccaattgaggtcagggcttgcacttggtcagcggttaagtgactgatatcttgaccatatagcaccgccttagtgtaagtaacgtcaccaccagcggtcatcattgttcgcccttgttctgtgatataggctggatccctgatttggctcattcagtcggcctcctttctacttttcaatcattgctagatagtttggatggtcattttcccattgttgggcttgtgcttcttgaccagctgggaatctcttgccgattacagcgttctggttcagccatgcttgtccttcttctagtttcttaactcggttcaccaagtcattgatttggttattggcaccggtcagctggttgttcaagctctcaatttgtgtgtccttagcaccatttttgcggttaaggtcgttaattgtattttgttgggcttgaaacttttgatcaacttcactctttaaataaaagaccgtacccaggttgacgttacccgtgttgtcgggtgccacgccttgaacagtattaatccctgcacctttaccagcaccagcgaccatttgatcaatttcttcttttgtgtaggtgtttaggttaaaggtatggttgccatccgccttgaccggttctttacctcgtaaggtgatagtcgtgttcttttcgttgtcttcgatcttgccgttaaaatcagccgttactttagtttgccatgcattaagctcggcacgagtaacgtatcccacttcattaacagtcatatcgatattagcggcttctgcgattgtcatagacaattgtgcagagataacatcagtagataaaccgtctgggctacctgccgctaaggtctcgtgatcgttagtagtaaaagtgatagcgattaaagcttcatcgccttgtaccttttgattctgttcattggttgagtcaactcttgcataccaaccaatacaactaaaattgatgtctgccggttgattcttgttgttaaagtcagcaattacatcaaagtgatcatctgtaactggcgttaaggttaattgcccttctttgagatcgtccggcaaactagtgatttgacgaattgcttcatcatctaaggcttgtccggaactattaacgggtttttgacttgataggatagcgcgtgtataaaccaatgtgcctacgccgttaccaaccgataagaagatatgtcgcccggcatcggtcaagatcgtttgcttcaatttctctttaaagcccgtattaggatcttctgccatttcttgctcctttctttgtattaaaaaactactcagtcgcaatcgattgagtagttgtagttaatgttttgttcccaatagttaagccagcgtgaatttctgctgtttgtggcttgctccacactgctgttgtcgcccataccgatgatttagccagttgaccaacaacaccaatgaattggcttctagtgctttcagctttccagccggtccaccatttggtatttgatgacaaagtattgtgatgcttgaactgtgtagctatcccaatatattgcttgtcgcttgtcctagccttccagccagtccaccacttaacgggcgatcgctcgattttgcgatgtttgatctgcgtacccatgccaacgtaaagcggcaactttgtggtagttacaaacacgatctcatcaatccagtagcccatcgcgagcaggttttgaatattctttatgatgaatttttgcatttgaagtgtttgcacattgtcccacggtatttcgataccaacatgtcgaagaccggttttatagaccttgaattgttcaggctttgcatttaaggcagtgcccagaattttaaccattgagggaattgttccctgtgccctagagattaaaatgtgtaaaaaaatgataaaacggaaagtttcatcatcatcactaattctataagctttgtaatcttgcccgattaaatcaagggttgtgccttttgctttgtcaatgctacgccactccgcaattttttcattttcatcactgattttttcaagcagtgaattgtaactgtctaacaattgataaaaaacggtatcttttttcttattccagtggtcggctacttccgcgatcagttggtctgttgtctcataagccaattaaatcaacctccacatctccagggtcacaatgagcaaattctgaacgaccaatagaaatattttggtccgctaacttatcttttgtgctaccgattgcaattgttgcatcatcaacgccgttgacatcataagtaacggaataaaggcgggtaaaattaactctttgacccatttcaagtgagttgatttcatcgcaaattgcttgcttaatgtcgtcaacccccgcatcactgttccagtcgtcattaattgatacatcgacctttacataaatgttatgttgttgagcgtggtcaaatttgacttcttttaattttcccgtagcgtccggagcttctttaacaattgaacccgctaaagtgataccagccgcgcatttatcaattaaggttttagcaatttcatcatcgttaccgcctaaaacataaatgtgaactgaacattcgggattaccgtattcatccgtcttatacttgtcgttgtcaacgaagccaacttgcttaacaccgtttaaattcattaacgccgatttaatacctggttctgtaggaccaggacgggcggcattttccataattaaacgttttctaaaggtttcatcgtcttcataatcttgcccaccgcctgcagatcgtggattggttacggaaataaagtcttcatctgggttggcaaacaaagtaattgtgttggctgatacattagtaaattcaccagtttcttcacattcaacatttccagttccttgaaaagccccgttgctttgttttgaagtgataacgtcttctgttaaatcaaataccaagccgtcttctgtttcgaacttttcgccagcttgaattaaatattcgccttcagtcgttattactacttccgcatgagatggagcgtcaactttacgggtcaaactgatattgcccgctaatcggtctaatgctgaatttacagcggttgaatagaatccagaatagtaaatttgttcctgttgctgaattaaatcataagacgcatcactcattaaacgggcaaaaattcctagataagcattacttgttagtgcaatatcatcccctaatctagttcggtaatcgtcttcaacaccgtctaagatttccgcaaaacttggggcaatataaccggtttcttttaaaccaaaatcagttgtcaacttgtaacccccccttctacttcaccaatatttgcggtggctctaaaattaatctgcatttttctttcaggtttcttgataaattcgatattatcaacggtttcaacttccggtacgtttgcttcaatagccgctcgcatatcattctccgccgcttgcttattgaagtttttacctaaaaagctgctataatccgcgcccatttcagggtctagccgttgcatttcgccatatcgaatttctagcgttgccttaattctttgcgctatttcgtcaagaccgctagtcatttctaaatcgtgagtaatcggatcaataactaggtcatgattatcactcataaataggtccctagccatcgtcgtcacccttataaacagaaacgataattgagtcgtttgcatcatgcatcctgccggtatttggcgtaaaggtgttcccagtgccgtcccagttatcaatgtcacggtccatagtaacggctatcactacagcgccaactctcatagacttctttttcggataatgttctaaaaaatgtgagttaacttctgggctactatcaacggcttttaaatccgacttaaacttatctaacaattcatcaagcctatagcaagattcggcaaccggaacatctaagtactgagccgatttagtgccatcgatccaattcgccagcggttgaatatctgcaatgtgttttttcttgtcgtaagttaaaactttagctaaaaaagcagattcaagacttctgctgaatcggtttttcaccttactaatgttttcataccatcgaattggaaccctatttttttgtttcatactgtcatctccttattttttagatttactttttttcttgcctttacttttagattttgttttatgaccagccttagcttttgtaaccgccgcaatagtgcattgagtttgtggactttcgccatcaaaactatgctgtccatttttaacgacaaattttccttttaagaacttagaattcatgataatgccggtattaacggtaacttctgggactaagggcgtaacaatttgccaagttgtcccgtttttatcatcatcgttttgcgatggaacttgaattaagtctttatcatcaatcacaaaccaagtatttttcttgctattaggattgacaattacgagcttgccacgttcataaaacatttccgattttgctaacttaacaaagtttttaattaaagttagcggcttgcctttagcggtaaaggattttttaattccttcatttttagctaaatcgattttagctattttgataccggcttgttccgctattccttcaattacttgcttataagtcgttccttttcggtaaactcggttagcaaaataagtcttattatcacggcttttaacccttttatttgtagtttttggtttaacccatacttttcgataagcccaatggtggactatatgtttctgcccttttttaggacctctcttgtaagtttcaacgaccgaggtactataacgctgattcttgtaatgacctttttcagtgattttaacggttttgtagtgattaacctttttattcttttttagctttagctttcgagcagctacattgctgtagtttgtgccttcagtaaaagttaaaactttactatcagttgtcccatcattgcttaatttacccgtattagagataaatccttcagctatttttttagggtctttaccccagttaaaatttatccagcagtgcatcccttttttataaaagtctttatgttgcttggttaaattgaaaatagttgttgtaaaagtagacgggacaggatcattagtaaacgggacttcaaacgtaaaaggataattatgttcgtaagtttcatcgttatatacgatttgcttgtgtcctttactatcaaccgccacaaattccatatgtggatctttagtaacgatcattagtaagacacttcctcatccgttaggtcgtcatcattttcgttagggtcataacctagcggtttaattgatgggtcttctgtttctgatccattcgggtcaacaacgtcaagatacaagcggacctcatatccaaatgttcccttgccttggtctgttgccttacccgtttcgtccatcgtgcgaatgtcaattcttggcaattcgggatcagggatatcaataccaactaattgaccaagcaaaagaggctcctgcgttagaagcctcttattgttatgccaaattgtaattgtgtagtaatccgcaacttcgttgtaatctactctcatatcataggtatcgcccacaagggttatttgaaagatataaggaatatttttaacatcaacatcaagataatttctcatctaaatcaccgcctacgcaacccgtattttattgccagggtagattaagttaggattcttaatgtggttgactcgtgccatccattgaacagaactgccgtatttcttagacaaagcccacaaggtatcgccagatttaatagtgatagcagtgtactttttatttcgattacctgcgacagatttagaagccttagacgactttctgtggtgcttactatcatttgaagtggtgatttttgcttgatagacaaactgaaaagtaagtgaaacttcaatgttatctcgaagattcttatagtcgttgttcatatttgcgattaagtaatgcttatagcagaagtcccctcgataggttaaccgaacatgcgaactattccattgactaagcatgtgccatttacggtatgaatcggctttatccttgcctacaataatgccagctactgttgcgcctttgctgtttacacgagcatatgagctatatggtgcaccttcatcaaccggataagaagtaatgtttgaagaaacattttcgctttcactgtctgacggagaaatatagataatttcgcctttgccgtctgaacgataaatagcacatttaccttcattcttccagccagtgttgtgctccgcaatttcagccaacttattacttaagtcaattctttgcgtaacaatacggtcgtacttgtcctttgcttttttataattgttttctgcttgcttttttcttttatttgcggcatcaacaagtttcaaacagttatcacgttttcggataagctttttctttttaacttgattcttttcaaaatgtgaatcgaagtcatagccctgcgcctttgaaaacatttttcgataaacggcaccttcatgcttttgtcgcttatcccaatatttcatagagtcgtgggctttttgttcagccgttctcttttttggcttagttgcttgaaccactagcatcaccttcatttctataagaaatcatcatcgtcgccaatattatcgccaatattatcaagaataatatttagcttctgacgtacttgttggtctacttctgcaccaatcatttttgctaatttttgcaatttagcattgtcaccatcaacgtcaccgttaatattcacggttacttgaatgtcacctaaagccccgccagttcctcttactgggcgtactttcggcttagatgaagttagtggctttaatctttgccgcgtcttttcatttgagtagatgtgaaccggatctttgaattcagctaattctggcccatgttcgccaactagaaccttattgccaacgacaggatcgccgcctttagcatatccaagaactttgcggatctccatggcacctttgacgtgctgagcattgtagccgccacgttcccattcagacgaaaacttgtttgctaggctggcaacgctaccagttccttccaaaacggagcgaagaatagcactgtctgagccttcgcctttaacggcaaagcttaattgtgtgccggcgtttttccagcttgtaccgtgacgtctagcataagcgattaagttagacttacgaccgccaagccattgacctaaaccggaagcaccaccgctgctgttaactgcaccagggtttaaaccacctgactcaaaattccaattacccagaacagccgcaataccgttcttggttgctttaggatcaagcttctttaatccgccggctagggctttagccctttcggctaagtcgccgccgatactaaatgaaccaagtgagccaagatcatcgctaagattctttttaatccaactcaaggcggtactgcctagctctttctttgcaagagccattaagttcttatcagccgctgctgtcttcttagattgagcggcattatgcaagccacgaacacggtaatatccgtatcccatgcctttgtcatcagcaattgaggtaacgcgtgcatggggtggcgtttcgttgaacattgttccggtgtgtgggttcttaataattcccacgtgaccagcggcacctgttccatggccaaagataaccaagtcgcctggaattgttttagataatgacttacccaagtactcaacacctgaactgtgttgcattgccacggtggtacgtccaatatctacgccaaagtgacgtaaagcttgcattaccatacccgaacagtcagatagtgtcttgcttgccgcacccatttggtacttaacgccactgaatgttgattcagcatactttaaaaatccttcacgagttccgcccttgccattagctccgccaattgcgttgttaatgacggcccacattgcgttagaccatggattacctaacttagttgatgaatttctagctaaattaatagagccttgtcgtaaatctgtaccacttgccttaatttttgaagtgtacatatcagcaaaactcttagcaggattatttccagctgtctcagcgatttttcttagtctgctatgacttacgccagagcctttcgcaaaacgctgtaatccccaataatttgccaattcttgtgtttgagaaccattgaggacagaatcacctttttcaagtggcaatatcctgttattccctcttggaatccaaatatcaccgctatttttgataattgcttcctgtcttggtccaattgtcgcatcattgaccattgccatggtgttttgggacaaacgcccatttgaacctttagcgaacttaactggcttgatgactgacgtgttaccaccaaactgtccaagaacttgatcaattcccttaataccagaattaacctggtcaattgtgtcgcccattgcagaatgagcgtacttggtcatgtgacctagctctttaccaaagccctttgcagtcgtagaagcaagatcaactacaccgtcatgcatcttgtccatttgcttatgaactcctgtccgcatgtgggtgtattcgtctattgccccttttcggctcttctgggcttgttttgtggtagtgcttgtaatcttgcgccagcttgaattgctcttcttagtaagatcattaagtgacttggacgacttagaagcaatctgcttgtagtcatcagtaactttcttggtagttttaccaaggctagcgttgccgttagcatatcccttgagctttaatccagcaccgagaccgccactcataacctttgcggtgtcgcgagcgttgagaattttttcacctgactggatatttgccaattgcggacctttagcgccaagcaaacgagcatggttggaataaggcttgtaagctaattcgggccccgcttcaccaactaatgaagcagtaccgttagcatgagcgcctaagtgagtcgagcggttaatgtcagcaatagtagtagcatgtgacttgctggcgtgatgtttaccaccttgtccgttttgcatagctttaacggatttgttagcacttgcaacactggtgctattttcaggcttctttgtcttccagtctttacctgatacaaaatcccaaacatttttgacactacttgcaataccgccaataactgagctaaacatgtctttaagaccggatagccttccagtaaccatgtcaatagctgactttgcaacgcccttcatgtccttccaagcgttgccccattttccgtggaaaatatcagatattgttctgacagtccctgatgatatttggacaatgcctttaatattggacgttacaattttgacagctccgcgaacaatgccaataccagttttaatgactgttgcgccttgtttaatagcaagctttaaagaagccatcaatcctgactttaagaagttcttgaaattcctaaaatctttattccggttaaggtcgcgccaatctcgcccaatatcacgagtcatactgctaaatgatcttttgacacttttaacagtgccaccaatcattttgcccataccagcatcgtgccaagttgttttaattgaccacacggcttgcttgaaggttttaccaacggatttgccaaacttagttttgctaaatctgcgtgccatgtcgccagcccatttgccggctacttgccctaaagtagacccgatagccgcaccagcgggaccgccgagataaagaccaacgccgccgccgattgcagaacctatagatttaccatagttttcaaacttctttttaggattctttgtggtgattgccttgtaaagatcaataccagaattaagggcaataccgccaatcgctagggcagaagcccccttgcttgctgtaccgcctaaaagaccagcagttttttgacctaatccagttttcgcaaatttaccgccaattaagttggagctaactttgcctataagtgaacccgttccacctaaaagggacgggctagcagattcaccggcaccctttgccgccgttttggctacagttttaccaccaataccaagcacattgccaactaattttttagcaacaaatccagtacttaacgccccagtaatagcggtgatataacctaaggcctttttaacaggtgcaggccatcctttaatggcttgcaagaccttgttaactaatctaagcatattagctaaaccgggtgctatttgttgggcaaattgcattccaacttgctttaaaagctgtcgtgtcacttccatttggttttttagtgacttcatatttttattagataagttagtaatgtaatttgtactatcagctctgttagcatccttaacgttattagcaatatcacgattatttttagttaaaattaatgcgtcgttaaagccagtttgaccgaataactgtttgaagtcgccagtaacacggttagactttttgccctgcgtagctcggttaagaatatcaaagacggcaggcaactgctttaaattgcctgatttagtaaagaaatcagcgggcgataaccctaaatcttttagtgccgcggtctttgtcttgctcttcgaagcaccaattaaacttgagacaatttgccttacaccagtaccagcagaggtgccttcttcaccgaagtttgacaaagtaccaagtacagccaatgatgacgaaagtgattgacctgtttggtgaagaattgaaccggacattttaaaagaattaccaaatccgttttcaccaccaactttaccagatgtcatgtcaccgacataagccgctttgtttaaaacttcccgtgtgtaacgtgccatcttcttagtactgttaccagctcgctttttatagccaaactgttcaagcataggagcggcggcattaacaatttgatcataatgctcattagtcgctttagcagcttgtacgaaatacttgtgtgcggctaaatcttgttttccggaataaccacgcctgattagctcttctgacccctttgccaactcagtttgatcaacgccatattttgtagataaatcagcattttcacgtctaatagccgccgtatttttcttagcagtagcggcactatctccaccagtttgctgcaggttcttaataacgttgtattcgtcagctagcttagtggcttcatcatttgcattcttaaaagccgctgcaactggaaccattgccgccgcaatgcctgttccaaaggtaattaattttgaacccgcatcatgaagcaaattaaagccttttgttgcgttatcactagcagttctgttgttttttagtgcttcgttagtcttttcagtggcatcttttgccgtattaaagccatttgaagcagtcttagcagaatcgccagctttccagattgtgttggataaaccgcccattgttttagcggaatcaccgacaccagcaattgaagactttaattttacgtttgcatcaattaatcgatcagttgaagtttttgtttcttctaaatgctttttgacttcgctggtggtttgaccactagtggttgccatgccgcctagttgcttttttaagccagcaactgtacgacttgtctcttcaacggaatttctgtttctgttgaattgttcggtaaagtcaggagcctttaaacgatcaaagcgtttttctaaaacaccgaggtcggaaataaactttctagttgtttgctctgcttcttttagcgaattgtattcaacgtttgtattaattccaattcctagatgttcgatatcagccacgttttcagctcctttctttaaaattcaggcaaaataaaaacccatcaatttaattgacaggcatcacctctatttatcaccaccgccaaacaattcaccgatatgatttgcttgactaatacttgttgtttctatgtcccgttctactacctttgccataatcaataattgatctggtgtagcattttttacaagccgttcaggaatcccgtgcattatcaaacgcagagggagttcaacataatcggcttgtctttcaatttctctattacctagtttctgtctagagtttttcagtaagaaaattcaaaacagcttcggcggcttcataaagaccttcatgatcgttccaccacttaattgacttaatctttggttggataatcacgtgcttcaagctttctctcagcaattccggacgattaattgcgccaaacgggttacgggaattttccagaatttcagttgcttcttcaactccagggaattgaagctttaattgatattcttgatcagtatcttcacgaatggttacggttttagaaagagcagtcaaaggtgtgaccttgcttgattccgcttcttccttaatcttcatttgttcttcgtgcgccttttcggcaagctttgcgttattgatttcttcactcattattaagtctcctttaagttaatttgatttcatgaaagtctcttgaaaccttcgaattaatcgctataggtcatgttcgaagtttcttccttgttaagcattgtaataggccaattacggtcaccagcttgtgcgccgccttgcttatctggaatcttgtcaattgatgcataatgacaagaaatgtgtgatgttgtgtcaatgatgtcaactgtgaaaaattcatccttgttaaacaagtctaaaagataggcattgcaaggagatgtttcatctaatggcaatgtaaagcccgccatagtcttgttattgtgcgatttagtagctgatccttgtggatcaatcttgtacgtatttgcatcagttttatcagtaaccgtaaacatgctgttttctgaaaatccatacatcaatttgtcattgatcataatggtgcagtcattggcatcatattcacgcattttagatgttttaatctttgaaggcatttaaactcccctttctaattaagcagccatgatagtgtctgaatcgacaacgccattaacggtaatagtatgaatagcgcttgaagcatggtattcaaagctagcgccgtcatagaatctgtctgacaagtgttggcgtgattgctgactacgtggagtggtagtaacgctgaacattgggcgaccagtagtgtcgtcagtcatgatgatgcccttgtcgtacgcttcattcaaaacttgtgttaagactgcacgaatcatggcaatgccttgagcttcatatggaatcttgccgttatcttgcaaaagcttctgcaagcggctttgacattcggtttgaacccacatcacaccgtgaagcaagtcaatatattcacctgataaggtagttccctctgaggtttgacctttgcccatcatttcttcataggcaatagcatgaatattgttaataccagccaattcttgactagttaagttttcaggcgtaatgccttcaagttgcttaaacttccaagtaattgagccaacatcgttaagagcaatgccaccgacaaaagcggcgtccattggctcattcaaatcgtgcttcaagccgatagtgtagttttgccccatcatttgggtaaacttggacaaatcttcagtttggagaactaagaagtgatctttgtttacttcaaagatgtttgacaattgaacggttgaatcgtcaattgtgttgtctacacatacgccaaaagtccagttgaagtaccagaaagccttcaaactatcgtaagcctttgacttgtcataatctaagacggctaagcggtctgagtgctttggctgagcaaagtaggctgtagcctttttgtaaacagccgaatcttctttgtagtcaactgccaccgcatcaaggttcttatattcacggtaaattgccccagtagctgggtcagtcttacgtaaaagcaaaccattcaagcggtcggtgtttgacaaagtatctggcaaagtttgagctggtgtcttttgtgcgcccttgtcgtctttgccagctgaatcaccgttagcagctgcagtagtagcatttaacagcaaaatattacctagccccttaattggttggggatgtaggacagtcataatgacgttcacatccatagggcggtcgtaaggggcgaccgtggttaatgttggcattaaagttcttcctttcttacgtttatttcttttcctgtcatttgattcatagccttaattgattcaatcgttgtttcattaaattcaaagttaaggtcttccggtttatagatagttccagcacggtaaatagaaaacgagcaatcgaaaccaaatctataaacgggtaattgcgtgccattatagaaatttcgagagcttgttcctgatacgttatgtggaatcacatgtgcttgtttaaaaaatcctctatatccgtaactgtgcgctaatgtcttgcgtaaatcattggccgtattcaaagcttcatacatgtcggttgcttgcacatcaatttgaagtcttacttccatgacatcagtttcgtctaaagtaacgtcacttccagggtctacccagtcataagtaataaacgggtaattgctacgcaaaccggcattcatttgcggatatacaccgcaatgatatttttgattaactacctggataagttggtatatcactaggtagttgtccatcattggtggcatttgggtttgtgtcatcctgatttactcccttcaattggtactcaaaaaagtgtggattcgtataaccttcataagatgatcgactagtaactttgtagtagccgccttgtgtcggaacattgaccacactttcaattggatatttattaattgataaccaaagtaaatcgccttgcacttctccgccgccgtctaactgggcgaagagttgtgcaaggtgacttgacattggtaaaactggctcatgaagcttttcagcatcatcatcgcttaattgggaataatcaggggcatcagtaggtgcgccacgatagcggggtttatagaattgccccgaactccaaactttaatgtctacaccgtacttgtgaatcattcttgccggattcattttgtgcattagatcaaacccccctttctaaatcgaaactatcatgaactttacttgtctttgaagctcacccgtatcgaccaacggattgtctgagcctttacgctcgatagtcgctggtcggttctttgggtgcttcaacttaattgatgacatagcgatgtcggcagtacatgcaacgcctagccggctaagtagctgcttacccgttgcttcacctgctagaacttttgcaatatatctccgcactaattgtgtgtacttccttttgttagctaaataagcctgccgaataaacgggcgggctggtatttgaacaagcttactaagatagaaatatgccactaacttgccgtgatcgttaacgcatgctactcggtgccctttaggaataaacaagccttcaatatctttcgggccttttcctttaggacagtctttagtaggaatccatagccactcgccatttttaggcttgattgtggctccaaattcgttagccccaacgattgttagtaatctactttcacgttttccaaaaaaaccaattacaacctgatgcgtttttaagtagtcaagttccttagttacttctggaatacggttataaccttcaattttcatcagtgttcgattattctaatttttacgggattgccgacataatcttggtacagcctccaatagagctgtccccatggagagcgttgtaaccacttcaagcggctggtatcagcatagtggttttccaaaacatcgactttttcgaaagtcattccgctacctgccccgtcttgcgttgctaaaaggtgtagtgtcatggcacgggtagccaactcaagggctggcatttccgcaccatgaagcttttttactttaggaaacccgtcagaaatagcaatcattcgggcgttttcaatcaacgcttctagtgattcatcgggtacgtcatcggtcatacctgcagtatcaagctttttaatcagccctactgtggtagttgtgtcattcatactacttagcctttgtcttagcttctgcccatgtttcagaaccatcattcaagccggttaactgaacaattgcggctgggaacttaactgacaagccgcctgaacgttccatgtacatttgtttgtagcttaatccgttgtcagcggatggaatggctgtgccgtaacggcgtggttccattgcaataacaatttgtgcaacatcaggagtatcaaggtaaacaatacccatattctttttacctgcttgtcccttttcattgttccaatacttagcttcaagctcggtaacaggtttaattccagcaaatacaccatcgctgttagctccgttacgttggatcatgttccataaagtcttgtctggattgtattggttaaccaacggacgggttaataattcgtactcctttggtggcaaagctaagtaaggcttaacgttgtggtagccaggcaacaaagtaatctttgaagcggcatccatgaagtaattgataatcttgtaagcatcactaaatgcgtccttgttgttagggtctactaccttttgcaaggttacgcttggatcatctaaagcttgataacctgcggtctcagcatcagtagttaaaccgtagataggtctttgtgaatcgccgttaccgttgaaaattaaagcgtcctcccagtttgctaacgcgtcatgagtagcggttgcacggtcggtaataatatcgatatttctaccgccggtgtgtgaacgctctaaatcagcttgtgaatattcgaatccagctgccttctctgcaacatagcctacttccctgtggtaagttacatcagtggtagtgatgtctgttgcacggtcggtgtagtctgatgcttggcccataatttctttccatgcccattcgtaagtaagtgcccatggatcgggaagcggttttagctggaacattgttctgccttgaagttcttctcgttttggttgtaaaacaaccggatcaacaacgttgaaaagttcactataggcagttcccgtattaaatcctgcttttggcattatttatcccccttcttatcggtaccggtagttgatgatgtgccggctgattgattagtagtacttggatcagttgttggtgttgatggcttgtctaccgtggcgcctgtgccagtagtacccatgtcagttaagttgacatctacgattgcggtaccattagcatcgcctgcagtgataaagcgaccaacaacgggctcacctggcttagctggtctaaaagtaccatcagcattaatagttgcttgatctaagcggtcaacgtcttcagtaattggaactgacacgctaccacggcgtaaagcgccaatcttttcacctttaagccagtggtcattttcgatgtcatcgtaactatgaccaattacgtaagcgcgcttaaccgaaattgcatagataggtgccttagttgctactacggcttgattgtcttgaatatcaagggcaacaccataatcgatattagtagcagcggtaacggtataaattgaataatcttttaaagaaccgatagttccgttacctaattctttcttttgataaagttgtccaactggtaatggcattattcgttacctccttcgtataagttttgacgtgcttcaagtgctttctctacggcagtcttttcgttcgaatcgccagcagtacggccataacttacgccaccagcattagtactaaataggccttcataaagaccacttacaaagtcgtcacttttatctgaataatcgtgttcgcctaaatttttattaagagcggcttcttcgacttcacgttcgctcttaccggcaaagtcatagctgtcaccaacaactttcttagctctttcacggaatgctaaggtcttgttgattctgtcttcgaatgcatcccctgcaagttgtgacttgagtttcttattttcttcttctgcgctgtcggcgcgtgagttagcttcatcagccttcttcttagcgtcggcggcttcctttttgttcttatcgccagagccttgtaactccttaatttgggaattaagtttgtcacgctccgcaataagcttttctaatttgctgttgctgtcgtcagcgtcaccaacaagcttcgttaacttgtcggcatcttcaacagcaacgctaatatcaccttgcttggtatgtacttttgtaaagtccatcttttcacctttctttttttcgttatcttcaggaatttcttctgcactatcagccgttagccttaccgagtgaccagcgcgaccacggtctacaatcgcaacatgattaattctgatattggtttgcttagcatcgtaggcttgcccattaagttcacctttagttggatcaagctgcatttgaaaaccaattgataattcttgcttgccgtgcctgattttgttgattaagtcactatcagttatggtcaaatcatttctgatagtcttggttgctttatcaacacgggcatgatcggacataaagcccttcataaatcgctgggaattatcacagttaaccatgattgtgttgccgtttgcgtcggttgggtggtcgtcagtaactggtttgttattggctgaatcaaccgtagcagctgagaacaattcctctggtgtcttagcttcttgaattcgttgcccatcgaattgacggtatggtcgtacgccctcacatgtgattggcacattcttgacgtgcagaaaccccgttattggatcgatagtaaatttatcgattggcgtagtagtttcatacctaattgcgcccataagctatgcaccgtaaggaacttcaaccggtttgttaggaatgtaaattgtttgaccttctttaaccttcatcgttgctttgttgatgtggttgaagtatctaagttgctgtaaagctacagagaacttttgagcgacatcaaacaaactttcatctttaccaatcacgtaaggcttagcgtcagacaaatcaaacattcctttagggtcctttgctggttcaaccggcttcataaccggtgaactggttggcttatcaataaccggcttggtagcactatttaaaagtgaacccgttaagggcttgcttgtactacctgctggtgtacttgttggtgtattatctgccatatttctggctcctttctgcataaaaaaagcacccttcatgagtgctaatcatctattactggcatcgcaacacaacggcaattaatcggctcacctggaagctgtccatcgtcaccgccatctggatcatcgtatctaaaaacttgttgatctagtatttggtgtttaggtctaacccgtccatcctccatggattgccatagatatttttcaaagcccgcatgtgtggcgcggtatttattcaactcggctaaaatactgcctgtttgatcgttagcaattagccgagcatggttatatgacatattcgtacgcttaacaattgcgttggttaattccgtggcacccttaccatcactaattgcgcggtaaatgtcgctttgcaattgtgcaacgtacttatcccgcatcgaagtgatataagcggtgttctccttaatctttgctttgataaacgcttgaatagtcggattgctttcaattgcttgtgatgaaattgccctagcttgcgcattgacattgctataagaaaaactatttactgacagtacaaattgagttgcaacattttcaagttcctgtttactattagaattctttatagccaatatcatcaacgcaatcaaagcggacaaccgctctattttgtgagggtcattttcatcatcatctgaatcaatcgacaacgctccgcctaacatgtaattcttcaaataataatcggagtaccattgcgctgtttttttccatgacaagacaagacgctttaaagcccccagatacgatttttccaagttcatggggtatcttgtccttggaattgttttacgtcttcttgccatggtcttttgctcctgtgagatgtttttcaatcttagccttttctttggcaaaagattttctatcttggtcggtaatgtcatcatcggcactatcgccagttaactgaattggaatcgcttcgttagtagtttgttgaagcaaaatatcgtgggcttcatcagtagtaagaaagccaccattaattgctgtggataacgctgtggaaagcttaccgagattatcgatcttttcactgtcggttagtctccgcaaaggatagaactcaatgtgccaatctagtgagtccggatcttctgaaccgccgcccacattttcggaccacatcagcaatttaaccaaccattcaagttgtggcttgattacctgctcttgaagagaactgatactgtcgtagtagttaactacgtcctgtgaagcgccagccaatgtaccggcctgttcacccatcaaaatcgatttaggaatcccagttgcggtactaagttgttgccaagcaaaactaaatagtgaatcaatgccgcccggcttatttgaaactttttctaggtcgtcgtcatgtccaacaactaccaacgattcggtgctcataccgcgactcattctgtgatcagttttgcgccggtcatcctcagacagatcaaaataggcgtcgtttttccaaattttcatgttgtactcgtaaagcatcttaccggttgagtacaaaccagtatcaagggttttaatctggtcgtagcaccgcattagcaaagatgtacccgttgcatcgtcttccatcttgtccagcgaaatgtgtctatagcggctactgtcaattgtgatactttcaggctcttttgaattatcatctgagccatcagacaagccttcaagtaccagtttttcttctttgccaaagttttctagcgttggatcgttacaaatctggttagctttgacatgcatttgactaaaagcattgattgaattgacttttaaaatgttgtgcgggtctaacggctgttctaagctagttcggtgtttttcatcaacattgacgtttaaatacgcatctccaatgatatttctataaataatttcactagcaatcttttctttaggcaataatgcatctaaagctgtttgatagactacttgtttttcgtcgttgttattaatcactatccgccagccgtttcgagttgctgtttcagctggtaaacgggcgattcggttagctaaagcattagacttaaacagatggtcagcttgtttatagttgtattttctatctaaataccttgttgaaataaaagaagacgtatcaccgaatctgctgggtgttacgcctttactttcataatccataaagtcagcgccaattgtaatttgtgctggctttttctttttgccaaaaccaaacaattaatgacctcctttctaaataaagccgagtgatattttccgcttgtttctcattaggtacttaattgcataagtagcagagtcaacttggtcatcgtgcggcatgttagggaacccacaccattcctcaatcaattcttctgattcgggtttccatttagggtgcggtatgtatacctgacctgcttcaaaatacggtgacacagaagcaaaacgtgcttctttgctgtcggcacctggcgatactggcataattcccggtattttcttcttcaaagtatcaagaattgcgggaccgtttgccttgtcttcaaccaactttgatgttgattccgggtaaatggttgattggtacttaatagcgtctagcgtttgtgtaaagcttaaccgcttgtggcaccagcctggacgtaaaaacacctctgcatcacgtcttgaccatgtttgacctgctacgtagtcgtcattttctttagatttaaatgttgcatcccatgcttggatagtctgctgcaagtgtcgtggcagaatcttgacttctttctccgttaagtgaagccgtaccatcgtctcacgatcagggacatagaacttaatccattcacgcttaataatgttaccctcttgaaccgttggcgcttgttgatacatagcattaaatttttgagtacctaaattactcttctgggttaacaattgcttaatcgggtgcttttctgggtttaaggcttcgccattatgtctgcctatagcatcagtttgaccgcttggtaaatcataagcaatagcaggaaacttaatttcttcccagtcaaagtccattttgtctagtagtctgccagctaaatcgtcggtgctccacctagtcataattacgataatagaagcgttagcagatagacgggttgaaaatgttgaagtccattcttgccaaatattttcccttactgtaggcgattgtgcctcttttgcgtctttgatagggtcatcaatgattagcaagtcggctggtcgtccagtaccaccaccttgaattgaagtgaaatacgcttcgccacggtgtcccgcaacagtaaaatcgttagaactatttttaccgatggttaagccgaatagtcggttagcccaatcagtaaaatgctgtctttccttacgggcaaaccttgtatacatgtcttcaccatatgacgttaccattacctgattttcagggtatttcatcaggtaatagctggcgaaagtctcagtcacacacatactttttccgtgttgtggtggaagttccagtatcaaatgtttctgcttaccatcaattatttcttgaagcttgccacaaatatactcgatgtaatcataaagcttggcgttaatatcagaattagccaataaaaaataataggcgtagcttctgcgtgctagttcttccctagccgctaacgctataccttgcctttgttcattagtcaattccactgatatcaactccttggtctaaatttgctaaacgctttaaggtatccatgtctaacttgctcatgctatttcttgccttacttgcagtggtatcaatctgttcaagttgtttctttaacaacttgttttgcaaacgagtttgttgggctttagcacgatttaaactggttcttgccgcttgatctcttaacttagtctgtcgttcaaggtaataaacacttgcttcggtatctttttcgttagtgatcttcatggcaatattcaattttgcccgtgcttcaagttcctttttccacctagcaaacttagcgacataacttggatgtctcttcatatatcgacgccacgtatttgtagagatttcaatttgttcacaagcttctttaagactacagccagcaataataaacgtttgaaactgatttaatttttgttctgttattacttcgggtctaccacccttatcttttgtagcttttgccaaactgaaatcaccacctttttaggcaaaataaaagaactgatttactaaccagttcaataaacaactttcttaatttgtcaattcttttttctttcttatttttttaagctgttgcttcttataagcttcaaagttccctgcttggttttgcattaactttaattgcttaatctgcgaagctaaatcatttaatcttctagcagcgttttctaaatcgtcagaactaagatagcttttattagctgatcttttaagatcatcaccaactaaatcaatttgcttctttaaactttgttcggatagttctaagccttttgtacctaattcacaaaccttttgcaataaatcgaattctttttcatcaaacatttttaataccccttaaaatgaaaatacatacttatcttgaactaacttgccgttaatattaagctttttaccgtgattgtaaccagccttttcgtaaacatccctgtctactaaaaacattttagtggagtattctttcccaccgatattattagaccttgtgcttacactaaccaagcctaatttttcagcaattttcttttcaacgtaagcgtgtgtggcctgctataattactccctcattgtccacaacgataggctgttgccagccaaattctttaattgaatttgctacagcgtcaaccgcgtcatcgttgtcacgtgggttattttcatagggcttaatttcatcaattgatttagcttctacttgcatgatttagcctcctaaacttttaagcactaacataatcgtcattaaacatatgaacacaacaataactgctaacaaaaacgatgagaaacgttcttcacacgagcgttgcactctatctaataatgatggaacaggaacagatttaatactaataaccttaccgttcttatctttagttaccacgtaagttactttctttctattcatttttgcattcccttaaacttcctttaccgttgttggaacaaactgcaaatattcatcagctacaaactcatcatctttagtaatataagttacttcaaaatagcgattagaaagttttgcttcatctttgcccttaaaatcatggatacagaacatagccttataattacgagctatatagctgtaccaagtcatctggatttttgccattaattcactttttgaaagatcagcatttaatccaacttctaaaaggtaatctgcaattttccctttagcaattctaataaaaagtgaatctgtcataggtgcttcttcgttatttttcatttcctaacttttcttaccaaatctatctaagtaatcttgcggcataaagcccgtttcttgcttaaatagaatcttctgcttgatgttagcaactgtattagttttgcagtacttaacaatttttcttgccttaactaaacggctatgtctttgacataactcaaagtaccgtgtaggtgtcattagtacaggccatccagattacttgggtcaaacgcaccaggaactttcttatctagttcttccttggcttgttcgcctacatctttaaagtgctttgccagcttgtcttcaagtttcttatcaaacttagcatcctttgcggcttctacttgctttgctacttgtaaaatggtgtccttgtaaactacaccgataaccacaccagcggcaaaagttaaaattttgttcataattttcccccctaaaaacaaaaagcaatagcttagcagctactgcaattaacgtgatcctgaattttttggattctagtagcccatcatcgctgactacaacgagtaatgttggattcgaaccaacacgggtgcacttcgtaaccaattcaattgaatgtgttgtgaaataagttgcttattttacgcaccagattactcaacgggcaccacaggtattgaacctatgctactcacctaaattctgggaggaatctaaattaataacaagtatcaacttaacggtgagcagactacctatctgcccataaaaggcaagcctcttcaaacttgccttcgagcttatcaggactagaacaatgtttaataagctcagaccgctcggtggatttacacgtcttcgcagactacacaagccgaaggattcgaaccttcataaccagttttggagactggcgtgttgccgttacactaggcttgtaggagatagggttgcaccttttgcacaacccatatttatagtaaaaacaagagtttattaatgactcgtaataattgactaacaagttaaattaacgagcaacatcgaaagatcagatctctttcctaatctttcgactctactaatataacccgctttaatggtcaagtgttggtcaaaaatgcgtcaaaaattggcgtttttcggtcaaaagttggtcatttatcggtcaaaaattggcgtttattggtcaaaaataggtcatccatgcaccatcaacacgggaattagcctttcagcattgtacttcttgcggtaccgctctaggtgttgagcgaatatataaagtgcttcgtcccttttacgtccgtacgttcttggagaataattcatatcgttataaatccattgtgcaaaatcgtttttaacgtatcttctaaccaaaattttgcggtacggatcccgttcggtatcaggacaactgctcatagcttcaaccacagcacgggtagcattttcacagtccttaacaattgcatcgtacttgtcttgttgctcaatagcttttaaaaattgatcgggctgatggtttacattaccgccgccgtgaacacccgtagggtcgagaagtggactagataagtaagttaccggcagacctgaataattcataatgtctggaaaatcattttcaagaaaattctttgccttgctaattgttttttctttatcaaaattcagacctgctaaactcacaatcttcactcccatgaaaccagccacgctggtgaaacttctaatacttttgctaatttctcaaccctacttaacgaaggctctctttgttgcttgacgtaccattcaagtgatctctcactaataccacttaacttagataaatcctttaaagtaatatttttagcagcacaagcttctttaatctttaaaaacgccattaccaggcttcccgtgagtctggaactaataccaatattgaccaacatactagaactggcaagattataaatactattccaagaaacgcattaaaccagttacaatgcggcatccatagaataaataggttgctaataacgccaaaacagataattccaaatgattgagctagctttaaattccaagtttttcttttacttgctagaactataccaaggctaaaagctgttaagccacaagcatatatagcaactaccagcataattaatttaaaatacattgtttcccctattctcttcatacttccttgtaatctggataaccatagccgattaagccttcattgacgatctttacagcgtcctcaaccgatctagctataccgtggattacatgcttatgcattaaatcaagatggtacatttgttgcatttgactaattcgtccttttggcgccttaacttcaataaaaaatacttgcttatcttttaaacggtacccgattaagtcaggagttccaggcttaaccccctgaaaagatgaccattccttgtaggaatagcaccagcatttagcctaatgacagcgcatcgccgccaatttaaggtggcaataattgcgttttgaatcctatgttcgggacctggttcccgtctcacccttctaactcgttgcatcctttactcctgcgttttcaaaatgatttttaaagcatcctcgcttacgtgatgagttgcatggttgccataactgacaaaatgcaaatttaagtcatgtcccatcacataagttttaaagccgtctgtgattgtttctcctacttcaatgtctaacatcaattcacctcttatcaaatttttaagctagtttgtgcgttggaattttgaatttcacgttgaaggacaaaatcaggataccaattgtgagtaaattccatagctttttcaaagtattgcttttctaaactgtcataccttggaatttgaaactcttttttgaaatctctaccaaacgcattaaatacttttctagccttagtttctttgtaataattgctatttacaccgccaatggcttcaattaccttcttttttcttgcttgaagcagctggtagcgttgaacttcacttaattcacttgttttctcaatatggtcaacacgggcttcaaccttgcccattctcttaacaaggcgattagcaaccaccatagttagttgtaattgctcttccggcgtttgcggtaagttgtcttcatttctaattaattcgtccattcgattaaaggcttcaatgtattcaagcttgaacttcattgcatccctgccggtaaagcccattgcaagcaaggtgaacccgtcacggttcatgtagtacattggctgttcttgcccccgatcattaacataagtgctttcagcaaacatctttttcactgctgaattttcagcagtgagatttctaatactttgaagcacatttttatgctctttactaaaagtagcagctactttcaagctagttgtcaaagccttctggcttttcatgattactaagtcattcaccttgtgacgctcctttcataaactcagccatttttttaccgtcttcaaacgcttgttcagctctcccctcagcgtaaccggcgttgtaattattagtacctacctctttaaccaatcgagctaaaatcttagcctgattgtgattagttactaacttttcttgatcgattaagtcatagccctcagaagtaataagaccgctaatattttggacagctaagatattttttaagtaagttactgattcactagtcatttttttattgctcctttagttgcctcaaattccatgaaaagcctgaaatagcctccatagccttggccattttctccacttttaaataaacgctataaatagccatgttatcctcgccatataattcatataagcgaactgcacaaagataaatgtaaatcctatcccctttaattttcacattaaagtcgccatcaatttctttcaaatccttatctagctggtcaaccaactctttacgtctttcttcaaaagttggtttgtaaggtaccgtagtgatcacgatacgctttataggatgcaccaaacccggtaatttcgtagaataatccatgaagttaggctcaccctcaacatcgccaacatccctgccaaaatactcttttagtgcttctgttagtttcttttctttatcgttcatttctaaacctcctaaaaatattgcagtccatccgtaactgtaaatttggtgttttcatcaagctttcgcccgcaattaaatgctttactggataaggtaccccatcagctatcaaataccacttgccatcaaattcattaagaccgatatgaggcctttttattcttgaaaaatttcttgttggacttaaaccaggtccattgtgataagcgttcaacgtcccacaaagatagcagccttctttacgcttcatcactcttttgtctgccatttttgtcctcctttgcttgtaaccacagttctttatacgaactgatagcatttacaattttggcaacgatatcagctgatagaatttctttttccaaatcaacagccagagttttttcattacttttagtatcaaaagcttctataatcgttgctatcctcgtgtcactgtaaaaaatagctatgtttgctccatttttagtacaagtaacgttatttttaattgcttgcaaattcctgcgcagtgcttcaaatgctcgatccaaagtcattggtcggcttttaacagaatcaacgaataaaataatttttccagcacgcgtatagctattcgtaacttcgtactcagcattagtgatcttcccaaaacatagcccatagacctcacccaaaagttcattaacctttccaagtttactttcatcttcttgcttcatttgctacgccaccaatcttttaaaacgttgaccgcagtcaataccgtatatgccgccagccacaccatcgcggtgacgatgaacatgaccagcaggactttgattacatcaatcatggcttatcccccgctctttcagctctttatcacttagtacactagacattgatgtataagtgtcattaggtttaatgaatacaaaccatcttgtatgccctcgcttgtcccctaaaattggatcgtggccaacaagtttcaaaacgtctttaaaagggatctggttatctgaccacttaacaagaagtaccccatctagtgcaagaacacaccacaattctttgaagcctgctctcaattcatcttgccagttgtctttatctagcctgccgtattttttcgctaaccagctatttttgccagctacattgagatgtggcggatcaaaaacaattaaatgaaattccatatcccgaaatggcaacttagtaaagtcagcaacaagatccggttggatttctattttcctagtgtatttacgatccttagcagtaaggatttcatcacgtatatctgtgtaagtagtatgtggctcatgcttatcaaaccaaaacatctttgaaccacatgctggatcaagaattttcatccctttaatcctctcttagcttcttttcatcaaacatatagacagctaaatgaccggcgcttgcgccacaaagagggcaatgcaagttgtcttctgccgttaaaacatcgtaagtgtctattgatacgttttccccgcaattatcacaatgaaacatcatttcatcttgtccatgtccggttaatcttttacagttcataaattttcacccctatctctgttagtccgtcaaataaccgttgtcggtcttctccaacaatgcagcctatgccttttctgccaataaattgagcacatgctatgtcgtcagtagtccaatagcctggctgaggttcagggtgcaccacttcgctaaatgtaaccttaatagtgaattccctttgaactaatgcatattgcttgccgtcaactagctggtccgctgacgtgatcagttttctagtcatcatcgtcattgtgtgtcaccttcttcaaaaaatcattgtctttatgctcttgccttagcttgtcgaattcatgatcaatcaattttaaaagcaattcagtatgtgcatcatgttttttatcattgttcaagcgcgaaagtatttcatgcatttcatgatcatcaagcatggtcagtgctttcataagcaagcgcgcattaactactcgcatttcttcatcagtcaaaacatgaccatcatttgcggtaaggctttcggcacagtcaaccactatcgcagatttgatatagtctaatgcaattgtcatatcatccgcacgttccactgatttctgaattttctttactgtttcgtctttcatatttattaattctttcttaactcaacttgcgcgtcattaggtaaaacaataacttttcctctttgccggatttcaatcttttcaccagtcgaatcattaccaccattgttatagggatacacactaacatcactataggtcttagagctcttgtccgaatagataaccacaacctccttaaaatgccccgtatcaataccgttagtgttcgtcatagcactattccaccatcccggcatcgtacagccggacagcattacagcgataattgacgctagaaatacgattttaatttttttcatttacttaaccctttctctttcttatctgctttaaaggatcctgtcgatcaagctcccgcagaattccagctatttcttccatcgcagaattatgacttttttgctttgcataatcgcaaacttccgaaaagttggtgtctaaatgagttcttactaaaagagctccgttaaagaagccagtaaacatccaaacaactgtatatgtggtgttcgtagcttcgcagtaaaattgatcaccggtatttacatcatcaaaaggtaaatcaaataattttggctgatccatatttagcctcctatacctcttttttcttgttcaattgcgtaatccattacttcaagggctaagcggctaaggtcgtaagtcataacaacgatttcattccaatcttcgggcgctagcacgtcatgcttttcaatttgcttcgcctgatgcgtcagctcgcgaattcggttatctagccccatatcagaccacttagtattttctagtaagtcgtttaagtcattcatcgctatttccgtttcttaaaatcttctagtaacttagcttcttttttgtttcttgcgccacattgcgcaattgctgaaatgtattcatccctgaataccgttttccagccatcgtcatctaaattatccaaacgcttatcaattcgagttataaacggcatgaccgtccgaataaagccttcttccgttgagcaacctttccaagctacttcatgtgaaatgtgaaacctatcaaaagttttcaaactatcaagcgaataagcttcaattctcacgttttttgggtttgccattggtataaagaagaatttaaatcccctaatcgtgataggaacaccccaccgtaccagccaacgaccttcaacatctaactccatgctggaccgtggcccaacctcaatagctacaaacttacgcattttaactcctaacctcttcaatattttcaaacccgtaatactgacctaacgcaacctccgcttcagtgaaattatcaaactcacctaaagcacattttttgaaaggataaagccagtacaactcgtacttttctttttcgttaagaacaatcttgataagcggatcaccgtcaagactttttacccgaaacagaacactaggcattgtgatcgtttctcacttttggtgcgtgtccaaccgtccacggtgctggcatttcgtccctagggcggtcaaagaatttatacggttcaaagtgcgtcacgtggttcaaattaatgcaccccccgttttttagccgaagccagttgttattttctgctaaagcttcgtaaatgctttctacagttacatccttagtcttaaaggtttgaccgtgtacgtaagtaattgctacgccctttgtatagctgttcaaagaactagggcggttatgtgtaaagctactgttcttgtagtgacttgggttggtatccaattcactaaatttacttgctttaaacttacaattgccaaaattgtactttgtattcattttttgtttttaccttgtttctataaatctttaattactagttttggatagtctggttgcattaaagcaaccataaggaaggctttacccaacatttttctaaaaaattgccaagtgggtacatctgcaatgttaataacgattgatccgccgcggcagataccatctcccgcatattttgtctttttgatcttagacggtagccaaacctcaactgtgcaaacgttactaagcttccctaagtaggctttactaatctggtcaatttcataagcagttaaattagggttgctgtttgcgtacttttgacttgttagataaaatttcatgttaatctcctagtaaaccatgctcagcaaatgaaaagtaatttccattaccaacgataaaatggtctaacatgcgtactttaattagctcagacaaatttttaattgaatcagtcatctttaaatcagcttttgagggcttcattgaaccgcttggatgattatgtaccacaatgaagttagcggccccattaaggcataaggttttaacgattaggggcactgaaatagctgaattctctaccgttcctgaacccactaaatcatcagaaatgatttgtccttggttgcttaaactgatcaaatgcatttcttcgtgatcaggttccgcatatttgccggctaggtaatcgccaaaaccacgtgaatcatgaaagatcggttcccttgtagttgctaaccgcaattcaagctctagcaatctgatataagcctttagccctctttcagataagttgttgctaaacaaaccgaccgacatttcttttttaacgccttcaagcgttttaagcttgtcatagcgacttaagtcatcgcttaccgtattgattaaatcttccatgttcatttcttgaacatttttttctttgtaatttctttgagtcattgttctagtcctttactttccaagtaccaagtcccaagtaaacgattttccgatcacccgtaacttggatttttccgttgttccgcgtatcaatcgcataaaggcgactattgggaatgtagtcaacaccaagctttcaccgcataaaggcgtattgaaaaacatcagaaagctggcggggagttactacgcaaccaattgttaaatcaaaaatcatttttacagcctctcctttagttcttctttgctaatgccgcaaacagtcataacttcatgaattacccgcaaggcttcttttttagttaggtggtcatatctgccttgcaagtaaggaacggatacaccgtagaagtcggctagcttttgccaagtttttaactttggttcagtattaccattttcgtaattactgtacgttcccctttttatgcccattagaccttcaacatcatcaagggtataacctcgaacttcccgcatttcttttaacctgttcatcacttaccccagctttcagaatctttgtcaattgctaacccatctcggagcatctttagcaagtaggcaaacgggtcatttaacatgttccattgcattttcatgtcaaacttgctgacaacggcttttaaggtgtcaatgttacatcggtaaagcaagcttcttagttgcttaatctcgtcataagttggattagtagccttttgcttcatcttgtcgttcattcttgcaatttggaaaaattgtttataaatttgttcacgttctgggtcttcttcccttcttcgtccagaagaagaattagatgttctattatcatgatctattaaattgttatatttatgtaaagcgggctttactaccccactaaattcagctttactaccctcatcaagtgggcttgcccaccctagtaaactcagctttactaggttaggaccagcttttatttttctgcctagtattatttttgatttctcacttttaggatttttagcaggaaccgttatttgttcccttatgattagccctttttgttcaagtaggttaagccaatcaataactgattgaactgaggcatcaagaatattagctagtgttttgttactcatgtgaaagtcgccagttacgttaagcattgaaataatttctcccatcaaaattattgatttaggcttttttaagagttctttatcccttgatattgatggtggaatcattaaaaatgcttttgcacctttaaactcgtccattttaatcacctaaaatgtcatcaaataaattttgttgccctttactcattggagcatcttcttttttatcagaaaacgggtctaccttaggcttatctacaatatttttaattacctcgtcttccggcttgtgcttctttatttttttggccgcttctttaacttgttgatctttttcttttcggcggtcaatcgctttttgcttggttttatctaaatgatgtttgagttcataatcgcccagtagctgtttgatataatcgccagtcgctttatcatgcttgcctttaatccaattcttagccttaatggagtggttattgacgtaatcttcaaaaataatttttatagcattttcgtcaactacttgtgattgattcattttttgcgcttgtgcgtcatcgtcatcttcgcttgcaataccaaacgcagctgaaagcgaatatctttttccataactgatcaggcttgctgttgcttgtgcgttaccaacattaacgtttttaaaccatactttattagttcgtacactgtaacccgttgccgcatcaacaattacagtttcaacggttacgccctcagcaccgttgtcaatatcgaagtagtaagtcaatagcggcccatcatcttgcttagtgactttaatagcatccataattgacttgtcaacatcagctaaatcagcatacttgtaagtgtagtgataaggcttgccattttgagtggttcctcgaacttcaacttcgtgtgtttttttcggctgcacaatagccattttgaccattgccagatgcatagcccatgaagccttatctattcgattctgctgctcattcgtataagtaagaatttttagttttggttcattgcccgttttcttatactttttgatgtcaaaattcttaattaattcttgatttggctcaataaaatcactaaacccttgtttttttgtagtcattatttaattctccttgctttaattccccagtcttttaagaagctgttcaattgatcaacttggtacttagtaacgttttgaaattcaagcctaaaagtgtaagttttttccttaacttcacctgtttgtgggtcaattgccttgtccccgtgcttaactaggtcagcttgctctttcttttttgtttctttttgctttttagcaatttcaatcagttcatctttttctgcttgcatgtcgttgagaatttcatcaagtgggacttctctttgcagttgctcgaagtaatgggcaaacggaattcctagttcatcggctttttgaatgatgattcgcttatttgtttcgagctgttgcttatttttacgcaggatatcaacctgctcatacagttcagcttcaaatttagggttgctataagttttgttgtaccagctggcgttatatctaatcttgctaggatctacaccagcatcttcacaagcctgtttaatgaatttgacatgttgatcatgcttatcttgtcttaatttgtcatcatactgtttaagctgtgaatcgatatttttagttgtttcatcaataatcgctatcaaatcatcaatgtttgctttaaacatctttgctggcttttgaatgccgctagtaattgagattctttgtgagttgatagttcttttaagcttattgagattctttcttacttcttttgaagatttaaggttttgcggcgttactgtccaatcagcgaattcatcgtgaacctttaagatgttgtctttcatttctccgtattttggaaaaatgatttcagctggtttatagcttactgggtactcaataccatcaaattggattaattcattattagtcatcgtaaatatctcctagttcttcgccgtcaaagtagtcaatgatcaatcctcttagcgtatcttcatttaggtcgtaccaatcggctaagaaatcacccattgaaaagcttgctttacctagcccatatccgagtgactttgcaagctgattcaaatcacctttatagtcttggtttacctttttcatgaagaaatccattggcttttcataagcattgtcaaagtcgtcagcattttttgtaattaatgcttgctcttcgccatcccagaaaagaattgcgtctggctcttctagcgatagatcttttagtgcttgattttcgtacaagtactttgcttcttttacttgttctgcatttaacgtttccattgtggtataatttccttattgaaatattttttctttgtttaacaccctttactgtctctagcagtagagggctttttgttttgctaaaccaagaaactttttaacttcttttgtcaatctagcgaaatccccactagcagtgctgatagcattactattagcaagaacactgcgttggaagtctgtaagttgattcttttgtccacttgaaaaagtttgtttataagttgattccatagcttcattagtcctccagttgctccttaatcacttctttaaaagtcttaattcgttgctgataaccagtcagtcttaacttttaaaacttttgcaagtttataaagtactcgcctgtttggaaaactagaaccttgctcataccgcccaatggtacgaacctcaagccctacggcttccgctaattgctcttgtgttaagttcttgttctttcttgttcgctttaaacgaactttgaaaattgttgaattgctcatatgcctcacctactttctaagcttatttacggcacgcacgcctaaagccgtaaagagaattaatagaactaacaatagtgaaatgatttgattggagtgcgttgtaccgtaaatgcaaacctgttcaacgattccaaatggtaaaaatagaattgccaagaattctaagaactttccaaacgctttagtcatatgacttaaaacgtgatctaactttgttctgccgtactctctttcgtattcttctttgctcattttgctttctccctttgaacttgcttaccattttcaatacagtaatcaattactgacctacgagccgcattgactagttccgttgtcttttccgacttcttacggttttcaaagaacctaaccatcacttcacttagtaagtcttgcaagcctttatagccaggttcaaacgctactagtgaaccgttatctagccaaagataaaatctataatattcatcgctagtgatattgaattgatccgggttgtcgtcaaacacgccaaattctttgacgatttcgtaaaccttcttgtttgtaattactgtcatttttaacctcctaaactgggacttttgcattccaatcaatttcatgttggtgcttctgcatccactcacaagcttcttttgcaaagatgattgttctgcttccttctgctgtcttacgtgggtttactacgaagccaccgcatttagcattaacttccgggtattcatcaaagataaaggttctaacccagctcttgcccttgccttgacaacagatttttctaaattcatcaatgctccaagttttacccgttaagtcgtcttgattgtctttgattgattcattaacaatctgcttaaccaaattctttaaaattgaagtattaattaattggtccatttagctcacctcttcatacagattttctgtatttttcttttaaaaaaatcgaaggagaaataccgagaacttctgaaacccctaacgcaaaatcggcatcaaacttgattagcccattaacgtaagcgttaaaggtttgtcgattaacccccatcttatcggctacaaacttttgtgtaataccgtgagactttaaatattgctttaaaatttcattagcattggcaacagtaacctgtgtcattcgctcatctcctttataaagtttttctgtaactctttacatgttttatattactacagaatttatataatgtaaatacttttgtaaaggaattctttatttttctacatatttactgtattcaagctaaaataaatatgtaggttaaataaggaggtagcaaaatgaagtttaatgaacgtctatcaaatcttagggaaaagcacaattacagcaaaacacaaatggctaacatgattggagttagcctccctagatatgctaattgggagtacggctataacgacccagacatggacactttagttaaactggccaaaatacttgatactagtgtggattacttagctggtaaagttgataatccagtatcaagtgataaagacgtaaacggtgacttagatgacatgttagatgatgcacgttcttttgatggcaaaccattagacgaacatgacagagaattggttagaggtatattgaaaaggatttacagcgaaaaataaggtgtttatttatggataccaatgttagtaaattactcaaaaaatataaattaaagcttgcatttgcccctttacattgccctggtttaatagttcatggcaaagatggcaagcctgatgtggtagtagttaactctaagcttgatgacaacgaagtagaaaacgttattcttcatgaaatcggacatgctaaaaatgacggcgatgttttaggcgactatcaaacggatgatggtgctcattcttgcagtgaacacggagcaaatgttttcatgattcacgaaaaagttaagcagtattttgcattaggaaatgaaattcaagatgctaactggctaaacatcgctaaaagtattgggacacaagattatttacaggttcaggaagaattaaataggtatagatttgaagaataggagtatttaaatgcacgtattattaatatttttatcttttatattaccaattgtttttgcaatatatcggcacagccgagcaaagaaattaaatattaaagattctaactatggaaccatcacaatcatttcctctattgctattttcttttgtatggcagttgtaagtgggctaaccgaacctaaagctcaaacaaccgaatcaaagcctacgtcccataaaactaagaggaagtcaaaatccgaaaaggaatttgaaaagaaaatggataaaatagctaaaaagcaagataaagaatttaattctaaaaaatctagtagcagttctaaatcatcaaaaaaaactggagtacctagcaataaatccctgcgcaaacaagttcaaaaagaacatcttactactttaaagaaacaattgagctctttagattctgaaaaatatggtggcgatactattgatagcattaatgtcatgggatcggggcatatcgaagttactttcacaaaaagttttattaagcaggacactaaagatgaacgaactttaattcaaaaatccattgttgacgatattagcgatgcttacaatcgtttagcgccgtatcctggcaatatatctaaagcagatattgtattttttgatactgatggaaatggatacggaatttgggatactgatggaaacaaagaaggagaataaaaatagcccgcctactcaattgagtaaacgggctttattaataaggagatgattaaattatggcttacttacaaaaaaggggcaacacttggcgcgctaaagtttcctggtacgatgttcacggaaagcgtagatttaaaagcaagcaaggttttttgaccaaaacagctgccagaaaatgggctaatgagatggaagttgcaaaagacgacaatcaaatatctaatcaagatccaatttttgctgaatactttaaggactggtatgagacctataaaacgcctggcacttcaaacgccactaagaatagatataaagttatttattataatttgtctgagtattttggcaaaactaaaatttcaaaaattactagacacaaatatcaagattttatgaataagtatggaaaaacgcacgtaaaaggtacggtatataagactaatggaagtattcgaactagcgttaaagacgctataagcgagggactaataagaattaattttaccgaaagaattaatttgacttggaataatgaacgcagtagaaaaatagattatctaaatttcagccaagttcaacagctcaaaaaatcgcttttagacggaattacccctgcttacatcagtagatatatgcttttgactataatttatactggcatgcgcccgggagagatcagagtactaacttggcacgacatcgattttaaaaactgcactatccatatttcaaaatcatggaattatgataataacaaaattattgattatgattcagatgaaattgacaaagaaactaagaaccgctcctctactcgcgttattaaagtagatcagcatttactcaatattcttagtcaactaaaacagaacggtcacgaaagattatttattggcaaagatggaaccattccaacttcaagtgccgttaataaagtgttgcgcaaatattttaaaaagcttaatattaataaaaaaggtttccactttcatagcttacggcatactcacgtggctatgttactctttaagggtgttgacctttattcaataagtaaacgtttaggacacgccaatatgagcattacagccaatacatatgcttacatgctggacgaattaaaacaaaaatcggataaacaaatagttacaattctggatgaaatttagccgtttttgggaggtcggagaccttttagagaccgcaatatatcaaaaagcccgtaagatcaacgcttacgggcttttgtttacggaatgtgagggatttgaaccctcgatacaggtataagcccgtatacatgatttccaatcatgctccttaagccgctcggacaacattccatacaaagtactccggctgtcagactcgaactgacgacatcttgattaacagtcaagcgctctaccaactgagctaagccggaatattaaaaaagagcacggcagcttcctttcctcgcaggcagttgcccaccaactactttcggcgttaagaagcttaacttctgtgttcggcatgggaacaggtgtatccttcttgctttcgccaccgtactcttttgagcttttacactcaaaactaaacataatccttctcgcaaaaaaccttccagtttgcttcgctttggtcaagtcctcgactgattagtactggtccgctccatccttcacaggacttccactcccagcctatctacctcatcgtctctgaggtgtcttactgcttacgcaaaggaaatctcatcttgaggggggcttcgcacttagatgctttcagcgcttatcccttccgcacatagctacccagcgatgctcctggcggaacaactggtacaccagcggtgcgtccatcccggtcctctcgtactaaggacagctcctctcaaatttcctacgcccacgacggatagggaccgaactgtctcacgacgttctgaacccagctcgcgtgccgctttaatgggcgaacagcccaacccttgggaccgacttcagccccaggatgcgacgagccgacatcgaggtgccaaacctccccgtcgatgtgaactcttgggggagataagcctgttatccccagggtagcttttatccgttgagtgatggcccttccatacggtaccaccagatcactaagtcctagtttcctacctgctcgagttgtctctctcgcagtcaagctcccttatacctttacactctgcgaatgatttccaaccattctgagggaacctttgagcgcctccgttacactttaggaggcgaccgccccagtcaaactgcccacctgacactgtccctggcctggcttacaggtcgaggttagagcatccttcaaacaagggtagtatcccaacattgcctccaataagactagcgtcctatcttctctggctcctacctatcctgtacatgtttaaaagatactcaatatcaagctacagtgaagctccatggggtctttccgtcctgtcgcgggtaacccgcatcttcacgggtattataatttcaccgagtctctcgttgagacagtgcccaaatcattacacctttcgtgcaggtcggaacttacccgacaaggaatttcgctaccttaggaccgttatagttacggccgccgtttactggggcttcaattcaaaccttcgcttacgctaagctctcctcttaaccttccagcaccgggcaggtgtcagcctctatacgtcatcttacgattttgcagagacctgtgtttttgataaacagttgtttgggcctattcactgcggctaaccaatctcttggctagcaccccttcttccgaagttacggggtcattttgccgagttccttaacgagagttctctcgctcaccttagtgttctccactcgactacctgtgtcggtttgcggtacgggtatgtcatctctggctagaagcttttcttggcagtgtgattaccacaccttcgctacttttaattcactcctcttcacaactcgtgttgctggttagaagcatttgactcttaaccgcacttgttgcttgaacatcgttccatcgcgatgcgtgcttcacctcctgcgtccctccttcgctcttaacgatttgacacagtacaggaatctctacctgttatccatcgactacgcctctcggccttgccttaggtcccgacttaccctgggcggacgagcctgccccaggaaaccttagtctttcggcggataggattctcacctatctttcgctactcataccggcattctcacttctaagcgctccattgatcctctcgattcaacttctccgctcttagaacgctctcctaccacgtgctctttaaaacacatccacagtttcggtactatgcttagccccggtaaattttcggcgcagcgccactcgactagtgagctattacgcactctttgaatgatggctgcttctgagccaacgtcctagttgtctacgcaactccacatccttttccacttagcatagatttggggaccttaactggtgatctgggctgtttccctttcgactacggatcttatcactcgcagtctgactcccgtgtatggatatctggaattcgtagtttatctggattcagtaacccctgacgggcccctagtccaaacagagctctacctccattatcctctccacgaggctagccctaaagctatttcggagagaaccagctatctccaagttcgtttggaatttcaccgctacccacaactcatccccgcaatttttaacttacgtgggttcggccctccagtgcgttttaccacaccttcagcctggtcatgggtaggtcacttggtttcgggtctacgtcacctaacttttcgccctattaagactcgctttcgctccggctccgtcttttctgacttaacctcgctagataacgtaactcgccggttcattctacaaaaggcacgccattgcactttaatgtgctttgactacttgtagacacacggtttcaggttctttttcactccccttccggggttcttttcacctttccctcacggtactggttcactatcggtcactaactagtatttagccttgcgagatggtcctcgcggtttcaaccgggattcctcgtgtcccggcctactcaggattctgctaggcgtgcttgagatttcgcttacggggctctcaccctctctggcttaccttcccagataattcaactatctcttacactgccacgtcgcagtcctacaaccccaaatgataaatcacttggtttgggctctttcctcttcgctcgccgctactaaggaaatcgatctttctttctcttcctgcagctacttagatgtttcagttcactgcgtcttcctttgattagctatctattcactaatcaataatgcatctctgcattgggttcccccattcggatatctccggatcactgcgtacttaccgctccccgaagcttttcgtagttcgtcacgtccttcttcggctgttagtgcctaggcattcaccgtgcgcccttttctacttgaccttactcaagaattctcttctcggtcgctctacaatctgttctctttgattgtctcggttttttgcttggattatattcagttttcaatgtactagctctttttgaggtactaccctcaaaactaaacaaagtttctcagtgtgcttccgcttgctctggatacttctcttagcattcctgctctccatatccttcgcttccttagaaaggaggtgatccagccgcaggttctcctacggctaccttgttacgacttcaccccagtcatctgccctgccttagacggctccttcccgaaggttaggccaccggctttgggcattgcagactcccatggtgtgacgggcggtgtgtacaaggcccgggaacgtattcaccgcggcgtgctgatccgcgattactagcgattccagcttcgtgcagtcgagttgcagactgcagtccgaactgagaacagctttcagagattcgcttgccttcgcaggctcgcttctcgttgtactgcccattgtagcacgtgtgtagcccaggtcataaggggcatgatgacttgacgtcatccccaccttcctccggtttgtcaccggcagtctcattagagtgcccaacttaatgctggcaactaataacaagggttgcgctcgttgcgggacttaacccaacatctcacgacacgagctgacgacagccatgcaccacctgtcttagcgtccccgaagggaactttgtatctctacaaatggcactagatgtcaagacctggtaaggttcttcgcgttgcttcgaattaaaccacatgctccaccgcttgtgcgggcccccgtcaattcctttgagtttcaaccttgcggtcgtactccccaggcggagtgcttaatgcgttagctgcagcactgagaggcggaaacctcccaacacttagcactcatcgtttacggcatggactaccagggtatctaatcctgttcgctacccatgctttcgagcctcagcgtcagttgcagaccagagagccgccttcgccactggtgttcttccatatatctacgcattccaccgctacacatggagttccactctcctcttctgcactcaagaaaaacagtttccgatgcagttcctcggttaagccgagggctttcacatcagacttattcttccgcctgcgctcgctttacgcccaataaatccggacaacgcttgccacctacgtattaccgcggctgctggcacgtagttagccgtgactttctggttgattaccgtcaaataaaggccagttactacctctatccttcttcaccaacaacagagctttacgatccgaaaaccttcttcactcacgcggcgttgctccatcagacttgcgtccattgtggaagattccctactgctgcctcccgtaggagtttgggccgtgtctcagtcccaatgtggccgatcagtctctcaactcggctatgcatcatcgccttggtaagcctttaccttaccaactagctaatgcaccgcggggccatcccatagcgacagcttacgccgccttttaaaagctgatcatgcgatctgctttcttatccggtattagcacctgtttccaagtggtatcccagactatggggcaggttccccacgtgttactcacccatccgccgctcgctttcctaacgtcattaccgaagtaaatctgttagttccgctcgctcgacttgcatgtattaggcacgccgccagcgttcgtcctgagccaggatcaaactctcattttaaaaagtttgaatgattgctcattccttatttaagatctttgtctcaaatttattgctcgcgaattgacttcgcttcttgtttgggtttttacacccgcacacttttagcgaaactttgttcagttttcaaagtactacctctgtcttgcttttttgcaaagcagacagctttcatattttatcaaaccatcatttctttgtcaagaacttttttgatttgttttttcgtcttactcaagctttttctgctttcacctgacgacatttaaatatattaccagcttatttacttctttgcaagtacttttttctttttatttgttttctttccttgcatgtctgtttttaagctctcgtcgcatctctcgaagcgactttattaatttaccttattttctccgctttggcaagtcttgctcttcgttcggatttttaatatgaatatttcaatatcaaacgtatcttaatactattattcgcctctataataattaaaaaaatatttagcttgattttctctgcattcttcaaattgttcgaacattactttgtgaaaataaaaaaactttttaaaatttttcaacaaaaaaagtctgagattcttctcagactcatcttagacaccatacttgcgtcgaatatcgcgcttctggtctctttctttaattgtttgccgtttgtcatattcctttttaccttggccaacaccaatcaataccttggcaaagccatgttttaaatacactttaagtggaataattgcaataccacgctctgattgtgctttggccaaacgtgcaatttcttttttatgcaaaagaaggcgccgactacgtagtggctcatgattgtaccgattgccttgcttatattcactaatatgaacattttctagccaggcttgtccgttgacgatctgcacataaccatcccgcaagttgattcttctagctcgtacagacttaatttcggttccagttaaagcaattcctgcttccaatgtttccttaataaaatagtcgtgtcgtgcttttttattttgtgcaattaaattatcttctttttcttttttcattaagatcaatccctaatgtttaaaatttctccgacctccacggtttccattacctcggccacggccatgatcgctgtgattattaaactgaccaccacggcgtccatgattattgcggaagccacggtttccacgacgacgattattcattccgcgatcgttatgcttatgcttaggcgcattaggatcatatatttcaaagtctaactgatgttgttcaacgttagcattaatcaaggttaccttaattggcatccctaccttatattgcttatgagtacctcgaccagttagcgtcaatgctttttcattaaaactgtaaaaatcatcagtcaaattcgaaatatggattaatccctcaatcgtatttggtaattgaataaacatcccaaaactagttaccgaagatactaccgcgtcaaagtgttgccccacttgatcggccatatattctgtcatcttcaagtcatttacttcacgttcagtatcaattgaacgtctttcttgcgttgaagtttgttctgcaacatctggcaagtaactagcaaaatgcttttgcacttcttcattagtcccctggtcttgatatgcatggatcatccggtgcaccatcaagtcagaataacgtctaattggtgaagtaaagtgagtatagtattctgcagctaagccaaagtgtcccagtgcttcttctgaataatgcgcttgctttaagctacgtagcatcatcatttgtactacagcttcctctggagtatctgtagttttagaaactactttttgtaaatcaattggcttaacgttatttggatccgcatgaatattcaagccaaatgcgctacaaaattcaaagaaagtcttgattctttcggcatctggtgtttcgtgaacacggtacaagaatggaacatgctttttgaagaaatcttcggccacggtttcattagccattaacataaatgattcgatcatcttttcggcagtaccacgttcatgcaaaacaatatctgttggcttgccttgatcatcaacaataatttttgcttctggttcttcaaagtcaatagcaccacgttgatgacgttgtttatacaaagcagcatgcaaatctgccatttcttcaagcattggtcggagtttaacatacttatcctctaaaccattcatttcgcccttaagagttttgttaaccttgttgtaggtcattcgaccatgtgagcgcataacagaaggataaattttataacctactcttttaccttctggcgtaatttccatgtcacatgacaaaacaagccggtccacgccttcatttaaggaacaaattccattagaaagtctaaatggcagcattggaattacccgatcaactaagtaagtactgttgccacgagcaaatgcctcttcgttcaacggcgtattttctgtcacatagtgagaaacgtccgcaatgtgaacaccaaggtgataattgccgttaggctttttccataaaactacagcatcgtcaaagtccttagaatcatccccatcgatagtgactgcaggttggtcagtaatatctactctaccctttttttcctcttcagtaacatgatcaggaatagcattagcttgcgccattgcatcttcaggccattcagttcttacatcatgtgctgccacaattgacataatgtcaacgccagggtcatttttattaccaataatgttgactactgcaccagtcattgactcaggattttcctcatctggataatccttaattgagaccttaaccatatcgcccatttgagggatcaagccattttcagacaaataaacccggtatttatgcaactttttatcgttactcaaagcatagccgataaaatgactgttttttctttgttcatcagttagcggatgaaattcaccaactaacgtttccaaaccatgttcaaggatctcttcaacttgaccttctggtcccttaccattccaaggattaccaccagcagtgatctttacttttactcggtcaccattaacggcatacttggtataatctgcggcaacaaagacgtcgtccgcattttcatcatctaatctaacaaagccaaagcctttatcattagctctaaattcaccttcaacttcagtattttcttgagctaattggtattgtcctttgccatctgtaataatctttttatcgtgctctaaaaaagaaagagccttaattaattcagtaaaattacctaatctatcacgacgtgcttcacgttcaatttgatctacacgaaattgtttttgtggattatggcgaaaaatttctaaaacgccggccaaaattttttcgttttgtgccatgcagttattctccgatctttaaatttaataaaaaaagcctccccatcatattttgatcgggaggtacaaaatttattttgaagacatataagctaagataatagcaaagacgaaaaagagtaccaataaaactgaggttactttttccataaatgcttcaaaaccacgttttttggtttgcccactaaaaacggcaccgccagataaggcgttcaatgcatcttgttgtttttgtggctgcatcattgttgcaatgacaattaagattgaaacaatgattagtagcgtcataactaaattatacaatgcgctgcctccaatacacacatacgatttacttaccaagtttatcacaaattactagtttttgcagttatttttttagttcaggcgcatctgtcttgaaatctttttgcgtcgttttacgatgattttgataccacagtgaagttttgcttggatcatcaaacaaacgttttaaagatggcgccttgttatagtcgtaatccttcggcttgactctagtaaacccttttggtttatagaatcggagcagattgccattaattacacgatctgacaaagacagctgtgtagttacggtgttagaaattgcagttaatttttcttttaatttcttattaggtttgatcctttcgcccgtcttggtgtcataataatcgctacccaccttagaatattccggagtgataaagtcaccatttctttgtgctacaatttgcggtgcatttttgcttagcaagtcatagccaaattggatcgtatctttgtctttgatccccagcaagttcagtaaggttggtaaaacatcgatttcaccgccgtaggtgtgattaatgccaccctttagtcctttcatatggaacatcaaaggaactcgctggaactgcaaattatcaaagtcattaaacgaatctttcttaagtaattctgcactagccttatggtgattacctgaaatcccatagtgatcaccataaaatactactagtgtcttcttatctaggcccgtcttcttcatccaacgcataaattcaccaattgcttggtctaaataatgcgcggtctgcacataaccatcaactgtttcatccccagtattcgttttatcaatcgtctgattctttttatcgatattatacggatagtggttcgttacagtaatcatctttaaataaaatggttgtggtaaacgctcaatgtacttgattgactgatcaaagaaaattttatcttttaagccatatccgatatagtagcttggtttgttctgatagaaagacagtggcataaagtattggtagccaaatgacttataagcattatttctattccagaaggagccagcaccaccatgcattacagcagtagtataaccagcttgttgatgcaaaatggctggagcactttcaaaagtattagaagtaccatacgtagacattgcactacctgattgtagtccgtataaagaattttcaagcatcatttcggcatcagaagtcttgccttgtcctacttgattaaagaaattatcaaaactaatggtctctttttgatgataaatcttattcagatttggcgttacctctttacctttccatttgtagccaatcagaaattgttgaaaactttccaaatggatgattaacacattttttcctttagccacgccggtgtaagcgggattaggtttaacgtaattttcttttaaatagtttctaacagacttcaaatcagaaacattagctttggccatctgtgcactagtttgtgctgtcttatagccatcataaatagcgtattcattgattcccagatatttgacgatgtaattattatcaaaagttctcgtcaaaagtccagaacgatcattttgggccatcaataaattcagtcccattaagctgacagccaaagcctcaattaacaaattaacttttagcttcagtggacgaacatccatcttaattactttggtcgccaataacacgataattacagcaatatcagcaaaagctaaaaaatcgctagctagtgtaattcctgcaatacttttacccaaattatcggaagtcgagcctgatgtcttaataattgaaaatgacaaaaagtttgaaaattcgcgataatataaaatattggcaaataaccacagtgttagcaaaaaatcgataactaaaataatccaataggatttacgtcctttaaaaaatagcccaattcccagcaaaagcatccctgaaggaatcggattaatcagcaataaaaattgctgcattggaccaactgctcctaaattaaacttagttaaatagataaaataagttttaagccaaaacaagactaaaacaatcgtaaaaaagcctaacttagtctgtgtcagccacctaaaaaaagatttagtgtgttccacgcgcttctgctcctctcattacggtaatttatcttactacgaaatttagtaagacaccgttgttttaataaaaattaatcatttttgtgctttttatctttttcggcttaaaaatccagcctaagatgccgagaagcataccgaaaaaatatgttgaaaagcgccaaataaacatagccaaaattaacgcaccatgtgaagaaatgaaggtggagaataacgtttggaaactatattctgcccctcctgacgcacctggaataggaatgatcgccataaacatgataatcattatattcatttgcgtaacttgataccaagaacaaggtacatttagcgctgttaataccataaatggaacggagtaaaagaaaagtagctgcaatactgttaaaagcgaggcaacaaataatttcttcttttctttttttagtttctgactctctgcataaaaagtatcaatcttttctaaagttgccttacgccacttctcaactcgttcctttttcatcatttttgccaacaagtccattaaccaattagttgcctttttagtaaaacgataagcaaacataattgcaagcaaaaagataattgaactaacatgaatcaaaaagccaattgcaataaaaattgctaaaccagcgaacttagtcattaccatatgaaagccaaaaataattgtaaatacataggcaaacaaaacaacgatctgataaataataaatttcatcagcaaaattgaggtggaacggccaccttccatgcccatttgaatcattgcggctagctgtgatggttgtccacccgtggacattggtgtaattgcattaaatagagcttgaataattggaattcgcaaaaacgaccaagctgaccttttaggctctttctttcgatgagctaaagtagctaagataccggcttcacatacataggacaaaagcattaaagcaaaaaccatgattaatccaaaaatattcaggccatgagctgcccgtaatatttccgatatcggtgtagcttttaaatctgcatatagcacaaaggcactgattgctaaaacaaccagaatgccccacaaatgttttttattcattaatgtatttgacctagctcttttcctaattcatattgctcatgataaaattcgtcccaaattttagctaaatgatcttctgaatactgttgacttgccttacgcgataattcgctgtatttctgcaaagtttgtggattggcaactactttttgcaatacttgattcatttcgccaaaatcttttccgcttagataatagccatcgataattgccttataaagatcaaggtcacgcaataatactggtgttccacaactgaatgcttccaaaactgacattgggaacaattcatcatatgatggaagaacaaataagtctgcaatatttaaatacttaactaacttctctcgctctacaattcccgcaaacgtcatattcttaggtggattgtcaaccatttctttgtaatgatcatagccatcagtaattttgccaaacgaaaaaccgcctgcccagataaattgaatatcaggattagcttgtgccatcttaacaaagtcatcgatccccttgcgttcctgtacttgaccatcaccaaaaacaacaaatttatcaagtggaattcctaattcatgacgaaatgcgtttttgctggccaatgattcttcataaaattctgtttttgaaacaaaattaggaatatatctaaccttgttccgatcaattccatagttaaccaacttatcaataaagattggattaactacaacaatttgatccatgcgtttataaaaatcaattacatattgataaaaaacttttttagctacgcctggcaacttaattgagccttctaatgtatctggtaaaaagtgaacatagccaatcttcctgccacgtgctggtaaaaaactatttgcgtaataggttggattaatcgtgtgataatgcgttaaatcgctattgccatatttgttaatcgttacataaaattcgtctactaagtgcgtcctcagaagtttaatcaattcattataagctgaacctacaccctgtcctttaacagaatcagcttgcgagaacatattaattctaatcatttagttcctctttttagtctcctcatcatgcttaggttgatagtgatcaattgcatactgataaaaatcagacacatttttagcaaattgatcagctgaaatcttctgtaatttattttgcaaaagttcctgcgggattcttttcgtcccttgcttaagcaaagtaataatctcttctaacatttcttgttgtgtagtaaatgtctgcccaaaaatatcttgatcaaaaatgttttcggtatagtctgtgtcataaaccacacatggcgtacctgcagctagagcctcaatataagtcaacccctgtgtttctgtatcactagctgaaacaaaaagatcagccattcgataataattaccaacatcgccatgctctacattaccgacaaaaataacgtaattctctagtgttaatcgctctacctgatcctttaacacatcaacatcagggccatcacctgcgataacaaatttcacattaggaaattcatcaataatttcaggcattacgttcaaaatatgattaatctttttttcggctgcaattctacttaaggttaaaattacaggcgcatcttgatcaattccaagttcttgccgcacatcacgttgaatatcgttgttcatgccctgcaaatctactccagtaggaatcaccctaattggtatttgaacgccatagcgccgtaataattcttcaactcggccactaggagcaatacatccatccatatttttcaaatagcttttaacaaattgtctaacatgatatggacgaagcaaatgcccatttaaaatatagtgcaagtaatcttcatacatcgtatggtaagtgtggatagcaggaatatctaattgatgagctacatatttgccaatagtacctaatgcaaattcagtttgagtatgaactatatcaagattgacttctttagctactttggttgcttcaaatagtcctctaaatgctattcgccgatcggtaaatgagacaaaaggaatactgctaaaacgaaatacattcggttctacagttccttttttcacgttcggatcagtagtagtaaaaataaatacattatgcccctgcttttccaacgcttcttttaacgttttaattgaagtagctacgccacttatctggggaaaatatgtatcggtataaagaccaatattcatttgagtacctccatatgtagcattataaagattcctgtattcatgtgcaatttatataataaaatgctaacattttaaaataaaaaaaaagcgatccaataattggatcgcttcataataatagcggtgatcggggtcgaaccgatacgtccgtaatggacaccagattttgagtctgacgcgtctgccaattccgccacaccgccataatattaaattttaaaataatcaacttattcggttgataaggcggaggtcggatttgaaccgacgattaaggttttgcagacctctgccttaccacttggctacaccgccataagttatgaaattatttagaattgggatagctggattcgaaccagcgcatgttagagtcaaagtctaatgccttaccacttggctatatcccaatactagggcggaatgtgggaatcgaacccacgcatgctggatccacaaaccagtgtgttaaccccttcaccaattccgccatgaaggtaaacagggatagtaggaattgaacccacactagcggttttggagaccgatgtactacctttatacgatatccctattatggaggagggtggattcgaaccgccgaactcagagagagcggttttacagaccgccgcgtttagccacttcgctactcctccagatgatggcgcgggacggaatcgaaccgccgacacaaggagcttcaatcctttgctctaccaactgagctaccgagccatcttacggtccatatgggatttgaacccatgatctcctccgtgacagggaggcgagataaaccactgctccaatggaccaaattgcgggagctggatttgaaccaacgaccttcgggttatgagcccgacgagctaccagactgctccatcccgcgatattcaactaaggaggatgtgggatttgaacccacgcgcggcagaaccgcctaacggttttcaaaaccgtccccttaagccacttgggtaatcctccattacttaatgccaaaaaaataaattgtggcaatgacccgtacgggatttgaacccatgttacggccgtgaaagggccgtgtcttaaccacttgaccaacgggtcatgtaactcactcaagagcactttattataataactaatcacatttcaaaagtcaagaactttttatttatttttttaattagctattactattgtgatctctcaatcacaacgtatttaatattaatagatattcagtcaaaatgcaagtacttttttatttttttgttgtaaaacatttatatctatcttaatacttcaaattagctagagcaaaacagcttctcttatctttaactaaatgatctttataaattgttccatattaaactgcttctttatatcactatgaaatcccccacaaaattatttttttaatatagatcatacaagaagaaatttaaaacaatcggctctccctatgttatatacacgattattgacttgaatcaatgtccaagacttttacctaaaagaagtgtaataatttccattaagtcattcaaaataatatgcatttaggtttatcaataactcaaaattaaggttttaacatcttatgacgtgttttcaatgcagagagaacttaacgaactcatctccttccatccactatacatatggttgcatataagacgatacatttgtaattccttactgtttcagcaggtatttactcctttgtaaacgtcccatactcataatatcattgctactggctcttagttctaacactttcatcggactaagaatgccgctcggtacacaaaaaaactgctctagaaattaatctagaacagttacttttctatatagcggagacagagagattcgaaccctcgcaccggaataacccgatctacacccttagcaggggcgcctcttcagccacttgagtatgtctccaatgggcctaaatggacttgaaccatcgacctcacgcttatcaggcgtgcgctctaaaccagctgagctataggcccatataaagcgggtaacgagaatcggactcgcgactaaagcttggaaggctttcgttttaccactaaactatacccgcacctaatataaaatgaaatggcgcgggacggaatcgaaccgccgacacaaggagcttcaatcctttgctctaccgactgagctaccgagccatcttacggtccatatgggatttgaacccatgatctcctccgtgacagggaggcgagataaaccactgctccaatggaccaaattgcgggagctggatttgaaccaacgaccttcgggttatgagcccgacgagctaccagactgctccatcccgcgatattaatataaaagccatattatggaccttgtaggactcgaacctacgacaggacggttatgagccgtctgctctaaccaactgagctaaaggtccaagcttacaattatagcggcgggggggatcgaaccctcgacctcccgggtatgaaccggacgctctagccagctgagctacaccgccaaaatgtaaccaatcaccattagattacaatcgggaaaacaggattcgaacctgcgaccccctggtcccaaaccaggtgctctaccaaactgagccatttcccgttatatgcgccctgaaggatttgaaccttcaaccttctgattcgtagtcagacactctatccagttgcgctaagggcgcatcatcaatgccggggatcggagtcgaaccgatacggttgaaaccaaccgcgggattttaagtcccgtgcgtctaccaattccgccactccggcgtgttgatgaaagcggaagacgggattcgaacccgcgacccccaccatggcaaggtgatgttctaccactgaactacttccgcgtaatataaatgccgattatacgacttgaacgtacgaccccctgtttacaagacagatgctctaccaactgagctaaatcggcatattgtcaatatgtggttggcaatacgggtggtgggacttgaacccacacgtccgaaaacactagaacctaaatctagcgcgtctgccaattccgccacacccgcatatatagggtcatgagccgtgagggacttgaaccctcgacccacggattaaaagtccgttgctctaccaactgagctaacgactcgatatggaggatacagggctcgaacctgtgacctcctgcttgtaaggcagatgctctcccagctgagctaatcctccatattgagcacggcagcttcctttcctcgcaggcagttgcccaccaactactttcggcgttaagaagcttaacttctgtgttcggcatgggaacaggtgtatccttcttgctttcgccaccgtactcttttgagcttttacactcaaaactaaacataatccttctcgcaaaaaaccttccagtttgcttcgctttggtcaagtcctcgactgattagtactggtccgctccatccttcacaggacttccactcccagcctatctacctcatcgtctctgaggtgtcttactgcttacgcaaaggaaatctcatcttgaggggggcttcgcacttagatgctttcagcgcttatcccttccgcacatagctacccagcgatgctcctggcggaacaactggtacaccagcggtgcgtccatcccggtcctctcgtactaaggacagctcctctcaaatttcctacgcccacgacggatagggaccgaactgtctcacgacgttctgaacccagctcgcgtgccgctttaatgggcgaacagcccaacccttgggaccgacttcagccccaggatgcgacgagccgacatcgaggtgccaaacctccccgtcgatgtgaactcttgggggagataagcctgttatccccagggtagcttttatccgttgagtgatggcccttccatacggtaccaccagatcactaagtcctagtttcctacctgctcgagttgtctctctcgcagtcaagctcccttatacctttacactctgcgaatgatttccaaccattctgagggaacctttgagcgcctccgttacactttaggaggcgaccgccccagtcaaactgcccacctgacactgtccctggcctggcttacaggtcgaggttagagcatccttcaaacaagggtagtatcccaacattgcctccaataagactagcgtcctatcttctctggctcctacctatcctgtacatgtttaaaagatactcaatatcaagctacagtgaagctccatggggtctttccgtcctgtcgcgggtaacccgcatcttcacgggtattataatttcaccgagtctctcgttgagacagtgcccaaatcattacacctttcgtgcaggtcggaacttacccgacaaggaatttcgctaccttaggaccgttatagttacggccgccgtttactggggcttcaattcaaaccttcgcttacgctaagctctcctcttaaccttccagcaccgggcaggtgtcagcctctatacgtcatcttacgattttgcagagacctgtgtttttgataaacagttgtttgggcctattcactgcggctaaccaatctcttggctagcaccccttcttccgaagttacggggtcattttgccgagttccttaacgagagttctctcgctcaccttagtgttctccactcgactacctgtgtcggtttgcggtacgggtatgtcatctctggctagaagcttttcttggcagtgtgattaccacaccttcgctacttttaattcactcctcttcacaactcgtgttgctggttagaagcatttgactcttaaccgcacttgttgcttgaacatcgttccatcgcgatgcgtgcttcacctcctgcgtccctcccttcgctcttaacgatttgacacagtacaggaatctctacctgttatccatcgactacgcctctcggccttgccttaggtcccgacttaccctgggcggacgagcctgccccaggaaaccttagtctttcggcggataggattctcacctatctttcgctactcataccggcattctcacttctaagcgctccattgatcctctcgattcaacttctccgctcttagaacgctctcctaccacgtgctctttaaaacacatccacagtttcggtactatgcttagccccggtaaattttcggcgcagcgccactcgactagtgagctattacgcactctttgaatgatggctgcttctgagccaacgtcctagttgtctacgcaactccacatccttttccacttagcatagatttggggaccttaactggtgatctgggctgtttccctttcgactacggatcttatcactcgcagtctgactcccgtgtatggatatctggaattcgtagtttatctggattcagtaacccctgacgggcccctagtccaaacagagctctacctccattatcctctccacgaggctagccctaaagctatttcggagagaaccagctatctccaagttcgtttggaatttcaccgctacccacaactcatccccgcaatttttaacttacgtgggttcggccctccagtgcgttttaccacaccttcagcctggtcatgggtaggtcacttggtttcgggtctacgtcacctaacttttcgccctattaagactcgctttcgctccggctccgtcttttctgacttaacctcgctagataacgtaactcgccggttcattctacaaaaggcacgccattgcactttaatgtgctttgactacttgtagacacacggtttcaggttctttttcactccccttccggggttcttttcacctttccctcacggtactggttcactatcggtcactaactagtatttagccttgcgagatggtcctcgcggtttcaaccgggattcctcgtgtcccggcctactcaggattctgctaggcgtgcttgagatttcgcttacggggctctcaccctctctggcttaccttcccagataattcaactatctcttacactgccacgtcgcagtcctacaaccccaaatgataaatcacttggtttgggctctttcctcttcgctcgccgctactaaggaaatcgatctttctttctcttcctgcagctacttagatgtttcagttcactgcgtcttcctttgattagctatctattcactaatcaataatgcatctctgcattgggttcccccattcggatatctccggatcactgcgtacttaccgctccccgaagcttttcgtagttcgtcacgtccttcttcggctgttagtgcctaggcattcaccgtgcgcccttttctacttgaccttactcaagaattctcttctcggtcgctctacaatctgttctctttgattgtctcggttttttgcttggattatattcagttttcaatgtactagctctttgatcctttttctggatcaatggaggctaacgggttcgaaccgatgacctcctgcgtgcaaagcaggtgctctcccaactgagctaagcccccagagtattttattttcggccagacataactttaactctttttcttcgttatgtcaatgggcctaaatggacttgaaccatcgacctcacgcttatcaggcgtgcgctctaaaccagctgagctataggcccgactaacgcttggcgtttttcaaatctttgaggtactaccctcaaaactaaacaaagtttctcagtgtgcttccgcttgctctggatacttctcttagcattcctgctctccatatccttcgcttccttagaaaggaggtgatccagccgcaggttctcctacggctaccttgttacgacttcaccccagtcatctgccctgccttagacggctccttcccgaaggttaggccaccggctttgggcattgcagactcccatggtgtgacgggcggtgtgtacaaggcccgggaacgtattcaccgcggcgtgctgatccgcgattactagcgattccagcttcgtgcagtcgagttgcagactgcagtccgaactgagaacagctttcagagattcgcttgccttcgcaggctcgcttctcgttgtactgcccattgtagcacgtgtgtagcccaggtcataaggggcatgatgacttgacgtcatccccaccttcctccggtttgtcaccggcagtctcattagagtgcccaacttaatgctggcaactaataacaagggttgcgctcgttgcgggacttaacccaacatctcacgacacgagctgacgacagccatgcaccacctgtcttagcgtccccgaagggaactttgtatctctacaaatggcactagatgtcaagacctggtaaggttcttcgcgttgcttcgaattaaaccacatgctccaccgcttgtgcgggcccccgtcaattcctttgagtttcaaccttgcggtcgtactccccaggcggagtgcttaatgcgttagctgcagcactgagaggcggaaacctcccaacacttagcactcatcgtttacggcatggactaccagggtatctaatcctgttcgctacccatgctttcgagcctcagcgtcagttgcagaccagagagccgccttcgccactggtgttcttccatatatctacgcattccaccgctacacatggagttccactctcctcttctgcactcaagaaaaacagtttccgatgcagttcctcggttaagccgagggctttcacatcagacttattcttccgcctgcgctcgctttacgcccaataaatccggacaacgcttgccacctacgtattaccgcggctgctggcacgtagttagccgtgactttctggttgattaccgtcaaataaaggccagttactacctctatccttcttcaccaacaacagagctttacgatccgaaaaccttcttcactcacgcggcgttgctccatcagacttgcgtccattgtggaagattccctactgctgcctcccgtaggagtttgggccgtgtctcagtcccaatgtggccgatcagtctctcaactcggctatgcatcatcgccttggtaagcctttaccttaccaactagctaatgcaccgcggggccatcccatagcgacagcttacgccgccttttaaaagctgatcatgcgatctgctttcttatccggtattagcacctgtttccaagtggtatcccagactatggggcaggttccccacgtgttactcacccatccgccgctcgctttcctaacgtcattaccgaagtaaatctgttagttccgctcgctcgacttgcatgtattaggcacgccgccagcgttcgtcctgagccaggatcaaactctcattttaaaaagtttgaatgattgctcattccttatttaagatctttgtctcaaatttattgctcgcgaattgacttcgcttcttgtttgggtttttacacccgcacacttttagcgaaactttgttcagttttcaaagtactacctctgtcttgcttttttgcaaagcagacagctttcatattttatcaaaccatcatttctttgtcaagaacttttttgatttgttttttcgtcttactcaagctttttctgctttcacctgacgacatttaaatatattaccagcttatttacttctttgcaagtactttttttctttttatttgttttctttccttgcatgtctgtttttaagctctcgtcgcatctctcgaagcgactttattaatgtataatacttgaatattaattgcaagtattttttcaataaagaattatgctcgctcttaaaaaggcgacttcaataatataccttaaaattcattttttgacaagcttatttttaaatgaatatttacaaaattcatgttaaagttgatacatcactactttgaggaggtcattaaaattaaaaaatttgatttaactattatcggtggcggacctgttggcctatttgccgcgcgatttgcccatcttcatggactcaagaccgtactgtttgattcattatctgaaacaggcggacagccacaaatgctttatccttttaagaaaatcaaagatattcctgcttacgactctattacaggaactgaactaatcgacaatttacgacataatttaacggatacaactatttttactaaccataaagttgaaaatgtcactaaacaaaaagacggctttattatcgatgatatagttgcatcccgcagcatattgattaccactggtgccggtgcctttaaacctaaagctttaccattatctatggatgatgatactcaaaaaaggattcattactttattaaagatcccccaaaatttgtcggacaaacagttggcgtctttggtggcggcgattcagcattagacctggcactagaattagctaattatgccaatgtcaaaatcattcatcgccgtaatcaatttcgcggtcttgaatctaatgtcaaaaaacttaagtctttaaaaaatgttgaaattttaactccttatcttcctaaacaaatcaatttggttgataatcaactgaacgttaatttaaaagaaatgggaaaagatagcttaactaatatcaagttagaccaagcagtcgttgcatatggctttaaagctaataatcgctttgtcaaaaaatggggaatcgatttagctggcgcacaaattaaggtgaattcaacaatgcaaactaatatcgccggtgtttatgcagctggcgatgttgttacctatcttggacgcgtccctttaatcgctctcggttttggcgaagcccagattgcaatcaccgcgattatgcgtgatcttttccctgaaaaaactttgacaattcattcaactagtttttaggagttccagatgagtttaatcgattttattttgcacattgatgaccatttaatcccgattgttaaccaattcggtggttggtcctatttaatcttattcgctatcatttttattgaaacaggcttagtcgtttttccatttcttccaggcgattcgttgatttttgctgcgagtgcaatggctgctaatcctaagtatggcttaaatatttggctagtttatcttatagtagcattcgccgccataatcggtgacagtatcaactatgaaattggtgcctggtcaaccagagctggtgaaaaacatagctggttcaataaattaattaatcaaaataatcggttggccgctgaaaagttctttgagcgccacggaccaattacgatcgttataggtagatttataccatttattcgtacttttgtcccattcatttccggcggcagtaagatgcattatggtaaatttatcacctacaacatcttgggtggcttgctttggacaggattgttcacaatcatcggtttcttctttggcaatattccatttgtaaaggaccatttttcaatgatcgtaattgctatcattttagtatcagttgtgccaatcgcaattgtcgcaatcaagaaaaaaatatcactcaaaaaagagttccactaaggaactcttttttacttacgtaataatttttcagcaaaatataattcataaataaccccagcaacggcaaaacaagaagcaaagaagccttccgttagcacattgataattgggtcagtattaggatcaaacagccaatcactattgttaaacaaaatatggtgaaaaatcacaaagaaactgtcgaaattggttactgcaaatggaaaaataataattggcaataatagcaaaataagggctactgatttatccaaattaagcagtagctttttcttttgtcgtttaaaaacaaagtgcactatgatgcagataataaaaactaatagagtcagaataaataaatgcttacattccgcaaaatgttctgccgcattagcagatgtagggaaattatccattttaagctgctttttaaagggccagagcaaataaaacatcagctggttataattatgcattaccttaaacaaagacatgtgaaccgtctcatatgtcttttgtacgatcataaaaataaacaataatggccaactagccacaattgccccaattacactgctagaaacagcaaacaaaaaatgataaatcagcgaaaaaatattgtttttagtaatcataattcaaattcatctaggttattaactaaaattgttggttgacgtttatctgcaatatccactttggtcgtcacacctgtcaaagtcaacaactgatctactccactattaaagccagctttaatatcggtatcgtaattatcacctaccaaaagtgcctcatctttgctatagccaactttatccaaagccatttttacaataattgattcaggcttaccaatatacagtggctctactccacttgctgcagcaacgaatgcacattgtgaaccattgcctggaattagctcatcctctgctggtaaattcatatcggcattagtcccaataaaagtggctccacgtctaatcgcccgtgaagctactcgtactttatgataagtcagatctgtatccataccgacaattacataatcgggattttcttcattaagctcaaactctggatgttgcaataattcatgccagagaccaatctgcccaataatatacaagccgatcttttccttgtgttctctttgtaaaatatagctagctgtggccatacttggcgtataaacatggtccgtatcagtttcgataccgtgtccctttagtttatcaactaccatttgcggtgttctggtcgtattgttggttaaaaacaaatagtctttccctgcttgaaccaaacgatgaacaaatcttactcctgattcaactgtttccttaccacgataaacagttccgtctaagtcaattaaaaatacccggtaatctttcactagtttccctttctctttttaataataaatgaatgatgccgtccaaattcttttttcactgcaattgattgtttttttcttaaatttagtttgatgaacacgccgcttcttaaacggattattttcatttttattcttccgataatttcgacgtcgtgcatgataacgctcatttttaccaaaatcgcgctcgcgtcgttcacgtgatcgccgtattttagtacgttgatgctgataataatgtactggatgcgttaattccaagataaaataaggtccgccgggattacaatattccgttaaataatccacgatcgccatttcttttttatcaattgcggttctagcaccgtctttataaaagcctttcaagcgtaaatgttcactagaaacgtcccccaccagataatcatactggtcaagataaggatcatattttttacgcaaagattctaaatcaagtgcgtctcgctcattgacaatgatgctataaagctgcgcaccaatcttaatgctcttaccatcttgcaccacgtcagcaagtgggtgtctaattggctgttcttgttcaaatttattttcttcagtcatctttttcacttctcgctgttaaaggatatttttcagccaaatatttaccaacaacttcacgtaaaaattgtgggaataaaaactcattttcaccgacaatagccaaagttggaaaaaatggaactaagacataatgatccaaacaggcaattttatattctttttgtggatcaatttcatgcccattgacgtaaactacacgtctacgcatatcaaccttgatccctttgtaatacatctgaccaaaaatttttcctcgaaaactcatcccttgcagtggaaaatggtctaggtaatgccgattcttttcaatttccatcactagtcgccacaaatcataacctttcaaggttgaacgaacaacgtgcattggatgcggtaaggcattttgtaaatcatattgagtaattattccactcttaaacgggggcaagaataggcctgagcttaaaatggctaaatctgttttagcaaaatcagcaatcgcatcaagagaaacttgaacggctgctactttatcatccgcaaatttttcaggtaaattagccacttttcgttctgataaaagtcgcttaccttcatcatagtagccctgaatcactgccttatcttccggttcttctggcatcgaagcagtagaaatagtgcgaggtactaccttaatcacgtgatgatcttcaagttctagatgaatatcacccacatagtttccccatttacctgtttgcgtaatccaagtatgccccactttttcaccatgttcaatcagatcatggctgtggcctcctacaattaaattaatttgaggataatgtttagctaaccagcgatccatttttaatccaacatgagtcaataaaattaagacatcatactttccttcaatttgagctaattcgtgatccatactgtcacctaacatcttgacatgccaatgattaggaccataagtcattggataagctgcagtcaggccaattaaagcaattcgcgtctttttcttagtagttaaaaacatatggccgactgcccatttaggcattgattcatcttcttcacgcaaatttgctaaaactgtcggaaagtccgcatgatcaaataaatgttccaatacccaatgtggattagaaattccctcattattgccaatcgtaattgcatcatagttaaacccattcatcaatttgatgttggcttgaccttccgtagcatcagttaaaggatgagaccgatccataaagtctcctgcatcaaaagtgtagataccatcaaccgattgatcagcctgcgcttttttcaagtaacgtccgattttagggaaatgttcaaaatgtgaatgaagatcattggtatgtaaaattcgcagttgttccattttttatgccactttctaaccaattcgattggcttttaagatcatattatatgcgtctaaaatttttcccttaggtttatcccattctacccattttggatttttccaatcactttcattagtcaaagtctgcaagtcataagtatcattgatatatttttcataagcaatcagtgccttagttcgaggaatattcagctgcagtattttgacttttttaattaagccatgatctgcagctaattctgcaattccattttggtcaatattagagatttcataatatcgactgccatcatttctggtaacttcttcaattaagtccaattgttccattaaatctcatcctttagatttcaatcataccgattactgataaaagaatagtactataaatagaaaaaaatgtgtaaccatgctattgttaagtatgcgatagaggtgtacacatgaaatttaaaagccgactcgtttgggttcttttttttagcttagtctttttcataaatagtggttttacagttgtagggcaccgtggtgatcccatcaaatatcctgaagaaacaattcaggctgacgattccgcctttaattctggtgctgattacgttgaactcgatctccagctctcaaaggatggagttccggtcattgcacatgatgatgacctcttccgagttactcatacacatgcaattgtatcacaaaataattttacagcacttaaacaactgcaatatgacaatggcgaacacgttatgtcactcagtgagctttttaagcattatcaaaataaaccaaacactaaatttgtcttagagactaaaattgatcatggattaaatccgtcctatgagttagaggataaaatcgcacaaatagttaaaaaataccatatgcagaaaagaatcatgattcattcattttccgctgctagtctctttcactttagaaaaattatgcctgaagcttatctaattttgatcgttggtagcctgaaacgcattaatttcagtaatttacctcaagttaatgctatcaatgcttcttctgacattgtgcaagagcatccctttttaattcactggcttcacaaattacataagcaactgtttgtctgggccgaaatggacgaatcgcctgccctatggcattggctaattaatcggaatgttgatggcgtggttaccaactatcccgctactggttttaaatataaattagccaaaagtggcactaaaaagtacgctattaatagaactggaatttattttggtaaaactaaagccgctacaatgatgaatccgtatgttcgcatcaaagaaaagaagtacgtgcaaccaggtcaaaaagtcaatgtcacttatggcgtccgtgtagatgatcgcttattttatcaaattgctgaaaaaacttttatttcggcagaattcgttaattttgacttaacaaagcgagatattgctccttatcaaaataagaaaattatcgctaaacctaaccaaaaagttacaatttatcgttatcctgataaccaagccaaaacgcagcaaaaattacccgcaaatcaattattaaaaattcaaaattttaatggtagtcctaaaaacatgtggatttataccaaactaggttgggttaaggcaaaagatatcttgttctatggcttctttagtcaagacgatttcagagattatcagtccttaccacgggtcagtcagtacactaatctcgtgcttttgccctataatcctaatcaagcaattgcaccaaccacttttacacaaaagcttcaacagattaacaaaattatctactaaaacaaaaagaccagtaaactggtcttttttgcttcacttaattattgatttaaagtactttgctttttaactaattcatatggcaaaacaatatgagtatcatctacttcttcattgttcatcaacttagtcaacattctcattgctacggcacccatatcataaagtggctgcttaatcgtagtcaaagctggacgaacaacagaagctaactgcgtagcactggcggtcacgatttccaaatcttctggcactttcttacctgcatccatcgcagaattcaaaataccaactgatgaaatatcgcgagtaacaattacaccatcaacgccatctttaactaattgtgggtataaattataaccatctgaatagtctttaatatcagtatagattcgaggagtgcccaaatcattttcttccatgaattcttcataagcagggattctgttttcgctgttaactacagcatcttgatcaccaactacgattcccaaatgcttcttaccatcatggtacatcaaatttaatgcttcagtatcagccttcttatagtcaattgtgacagaagcaaaatcatcacgattgtctttagtacctgctaaaaccacaggagtatcagtccgcttaaaggcatcagctgctgcatctgataaacggttagacatataaattacaccgtcaacttgcttattcagcaaactttgaataacttgatcttccttcatcaagcggttttcaatactagtaataatgatgttgtatttatataaaagtgcaatatcatcaatacccttagataattctgcaaagtataaattagttaaatctgggacaattaaccctactgtagtagtccgcttagaagctaaaccttgagctacagcgtttggttgatagtgcagtcttttaataacttcgagaacacggtcacgtgtctcttttctaacattactattaccattcacaacacgagaaaccgtagccattgaaaccttagcttcccgagcgacgtcatagattgtaacttcttgtttatgcatctcttatctctcagtccttccaaaaaatccttcacttaaagatatcacgatgctgcataaaatgcaaacacttacagcttttctttcattttttcattaagagatcatgatatactacagtaaacataatttgcaagaaaagaggacaatatgaacttagataaattacaacaatggttgcaagactccaataatgatcttgcttacatttctaatccaatcaccatttcctactttactggttactcaatggaaccacatgagagaatctttgctttaattgttttaaaagatgcggaaccatttattttctgcccagctttaaacgtagaagaagcaaaagcatctgcatgggatggcgatgttatcggctatcttgattccgagaatccttggagcatcatcgcaactaatgtcaaaaagagaactcacgatacccataattgggcaattgaaaaagatgatttgtctgttgcccactaccaactcttacgtggtgaatttcctaacgctagttttactaatgatgtttcaccttttattgaaaaaattcgtctttacaagacacctgaagaaatcaagaagttgcaaggcgctggtgcagaagcagacttcgcttttaagattggctttgacgcaattagaactggcgtcaccgaaagaagcatcgctggtcaaattgattaccaactaaaaattcaaaaaggtgttatgcatgaaagttttgaaaccatcgtacaagctggtaaaaacgccgctaatcctcaccttggtccaactatgaacactgttcaaccaaatgaattagttttattcgacttaggtaccatgcacgatggttacgcatcagattctagtcgaactgttgcttacggtgaacctactgctaagcaacgcgaaatttatgaagttgatcgtgaagctcaacaagccgcaatcgaagctgctaagccaggaatcaccgctgaagaattagatagcgtggctcgtgacatcattactaaggctggctatggtgaatacttcattcaccgcctaggtcacggcattggtaaaaacgttcatgaatatccatcaatcgtacaaggtaacgacttagttcttgaagaaggaatgtgcttctccattgaaccaggtatctacatccctggctttgctggtgtcagaattgaagattgtggtgtcgttactaaggacggctttgaaacctttactcacactgacaaagacttaaaagttttaccacttaaagactaattttagtcataaaaaaggagctgatcatcacgacaatgtcattaagttaagacattgacaaattgaatctaatctctgtagaaccgaatcattatgatttggttctttttttgcataaaataaaggcgaaaagaacctaccttttcgccctctgattaaattattaaaccttcaaaattattgccagaaagctggtgttaattatgaaagcccttcacagaaatattttagatcgtcttgatcaaattatcaatgatactggaaagcatattcatgattttatcgatgatcctcatgccttcactaggaagcggtttttagatgcagctacagtcattaaaactactattaatatgcaaggaaaagatttgaccagtgagttgtttagagcttttggccaaaaagctattaaaaataacgataaagtagtcagtacttccgcttatgtccaacgcaaaggtcagctttcacccgcatgttttaagcatattctaactgtatttaatcagaatttatttaatatccagttatttgatcataaatatcgtatatttgccattgatgggtctgattttaatcaaatctggaatcctaaatcagagaatatcgttggaaatctcaatcataaaggaaagccatattgccaaattcatgttaatgcactctatgacctgttaaataatacttatcaagactgcatctttcagcctaagtcaaagatggatgaacgtaaagccgccgttcaaatgcttaaaaagctaaattgcggaccatatatagttactatggatcgaggttataccggctttaacatgattgaaaattgtaatcgcctgcctaactgttattatgtcatacgtactaaaacgggatatggcgcatttaaggaagtagctgagttgcctaatcaagagtgtgataaggatatagcttgctgggtgactacctctaattattattatgaaacccataaggctacagaaaacgttcatttggttaaccatcattaccgtcaatatataaaatatcggtctaaaaataccaaagatggcagctgggactttggagagttatgtacaataaaatttcgtgcctgtaaatttagaattaatgatcctaaatcaggcaaagaagaatgggaagttgttctaactaatctaaatagagccgattatcccttaaaaaggatcaaagaaatctaccatttgcgctggggcattgaaacttcattcaaaaagttgaaatatgctttaggtagcgtacagtttcattccaagcaggatagatttattgaaatggagatctatgcccacatgattatgtttaacgcagtcagtcaaattgatgctcaagcatatgtaccacaaaaaaaatgcaagtatcaatatgcgatcaatttcaaacagtcatgttttgtcatccaggctatgtatataatttcttcttcaactgaaatctttaaaaagattcttattcaaattagtcattacacaattccgatcagaccaggacgaaaagacaaaagaaatctcaaacccaaatcagctgtatattatttatatcgtgtagcctaatttctaaacaagatttgggtttatttggcatgaaaaaagagcattcaaatgcgataaatcgcaaatgaatgatcttaaaagtccaagtcgataatttgtcaatgtcttaacttaatgacattgatcatcacgaccagctccttttctttttgactttaattaagcttgtggtttttctgaagtagatgctgcatcagtatcatctttttcagcattgttcaaatcgttaactgactcttcagcattttcactgtcatcgtcatctttatttgagtcatcgattacgatgtcgtcaaaatccttcaattctgaatcatcttcaacattcttagggaatgatgctaattgattcttaacgatttcagtaccattatcgtatttcttcttcaaatcttgaagcttgtcattatctttaatcttgttcttaacgtcatcaacttgttcatcactaacaagaagtgaacctgcgagaaaacctgctgcacatcctgcaacggcacctaataagaaacttgcgaattttttcatggtgaattcctcctttattaattttcacctctgcgacgcttgcgtcttgcaaatgccgtcgcagctattgaagaaataagacccgtacggcttaaatgattgctgctaaagcgtttagcgatctttttagatgaatcgtttaattctgatacgctttcgcctaaatctgcagcagctttaacaactggatctaacgtcttcattttaccattaacatcggtcattaggtcattagttttatctaacaaatccgaagtttgatccatcaagccatccatatcttcagaaattttcttcattgactcgttagttgtttgaatagttgcactagtttctttcaacaacttcgcggtccgaattagcattggaatcgtaaataatactaaaattaagaatgcaatcgccgcaattaagcctgctaaagcaccataagaaattgtcattttctacctccatcaacatctaaaaaaagtttagcatgaatatcctttattctcaattaatgtcttgttattcttaattatacccgtaagcaatagaaaggacaccaaatgaagattcctactcacataaatatacagaaaattgaaattgattggagtaaaattagccaaaatttattgtcaattatttggcaattagctattacttcactcattttttaccttttatcccattttggtcataaaataattaataattacttagccaagcataacacagttaagaataaaagaactcgaactatcacagctttgattaacagcgtttttcaatatacccttatcttcttctatttattcggtattctctctattctaggtgtaccagttggcaccttgttagccagtgctggaattttttccctagctttaggaatgggcgcacaaggctttgttagtgatttggtcaacggtttctttattctaagtgaagaccaatttgatgttggagatttagttcagattggcactaatgttggtaccgtcgtgcaactaggcctcagaactactcgtctcaagggttcagatggctcaattattttcatccctaaccgcaacattaccattgtgcaaaacctagcccatggcggtgtagcactagacattaatttggatcttgataccaaaaacgatattgatgaagttaacaagttaatcaaagaatgcaatcgtaagatccagcctgagaaaaagacaattgtatcaggtcctactattgtcggtgtgaccgaacaaacagggaaaaaatttgtttattccattcattttcaagttaagcctggtaaacaatctgctgtgaaaaatttgtatttgacccaatatattcaaattttacgagaaaataatattgcttttgcaagtacagaacgacctgcaaaaactactgcaaaataagtaaaaagtaactcagttcaaatcatacgaatgacccgaactgagctatttttatctaatcaaattgccttagccataaaatttactaaataattctgccaaatcaattcgaccaactgaatatggaatcttctctttagtcaatttaagtataagttgatctaatcctagattatcatccagtggcacaataattttattatcaggtaacttagtaaatcttttatcttttaaccgcgtcccggctattgcattcgcctcaattttcagatactgcttagcctgatgttgattatcgagatcttcaattacctttcctgccttcaagaaaagtacacgatctgcgtaagattgtagattatttaacaaatgtgaagccataataatcaatttattttctttttttagatctaataagtaatctgaaatcaattgtacgttttggggatcaagtccgttcatcacctcatctaaaagcattactggcgtatcagctgcaaccaccatggcaaaacaaagccgttgtttcatccccaaagaataagtttgtgttgggcgatcaacatatttttccatctgtaatttattaataatattatctacatttttatccgaatttttccaaagatccgcataaagctttaaatgatccctaccgctcataaatggaaacagatcactttgatcaggaaaagcacaaatcagtcgatgcagtttaataatctcacgattgctgcgataacgtaaatgatcatattctacataaccagcttgtggctcaagattatgtaaaattacgtttagtagtgtggattttcctgtaccatttggtgcaactaaacctacgatagttcctatttgaaaatttaaactaatttcatctaagacaacatgttcgccaaaagctaatttaacattatgaatttttaacatgttttcacctacttcactaatactacttttctaaactgacaaaatagccaaatagttaattcaattacaattgctaatgtaactaacggaataatcccatcattaaagtcccaacctggtgagtccattaaatacgataaattactagtcaaactttcgccgattgtaaaatatgtcattggtaagtgtttcaaaaatggataaacaaagcccatacccaatgaaaaataaagaactttagcactcattgccaaaacacttgaaataatagccgctacatattcatttctaaaaatcagcgacaataataaagtcaatctaatgaaaataaaggtaattacaactgcaaagatcaagaaaccaagataatattgtcccagcgtctgataaacaaagggcgttttgaaatacagacgaccagtataaattggcgttaataaattaaaggagccaaaaccataccttggcgcagtacacaacgtaacgactaaaaaagcaactagaaagttaaataaaattcccacttcaataaccgcagtttttagccaaagaattgtccttttagaaagaggaatattcttcactactgtacggtatttttgatcattggttatcatatctgccgcaaacaaaacaacaatcacaattaaaataatcatcgtccacccagaaagcgactgctgtaatctctgtaaagtagtccgttcttctaaaacatttttgtctaattttgctttacttttaagtaaaccatcatagaagtgaaatgttctttgatacccaaaatgtccatcttctttgtaattattattgtggtagtattccaagggatacatgtaattctgattttctttaacccaaatcaaattatccattttctgataccacttgctactgtatttggtatacaaacgccaatcatgattcttaagtgcttttaaacgctcatggtcatacttaatgatggtcggatatgtggtaacagcatctttagcaccttcactgggatcataatccgaagtacctttatctgcccgtgcaaattctttttcagccacctttaaaaaggcttgatcatcttgatattcttttgaaattgcatatggatcaacatcttcaatcacatgatgctgcggtgcgctgactaaaccaaagtaaagtgcaagcacgacggtaatgaaaaacagccccacatttttaggattagtcaaaaatatttttaattgaaataaaaaatattgccttttcatttttcaacaccaccttggttaaccaaatgcctgaaccagattaccagcactacagcccacactagtaaaatagtcataccaactgcccaatttgccggaataattgattgacttgcaacagtcccatctaaaaccttactgatatttagataagctgaaggtaaaaagaaaagatatttagcaatgctacccggtaaaagtgaaatactgtagaccaatgccgcaataaaaatcgttagataaacgctatgagttaattgattaagcaacaatgccaggctagtcacaaacatcactagtacaactgcatagactaaatacaacaaacaataaagccacagtggaaccgcgctaattttaccgaaatacaaaactgctggataattcaaactattaaagccattcttaaaaccagcaaataagtaacttcctaacacaccaatcactaacggaagcaaagtcaaagcaagattgatgataaatttgccttcaacttcatccctaatctgataaggaatatttttaagcagagttggatgtgataaattaatcatccagctatcactagcaataaataaaacgtagaaaaataagaacatgccgactaatcctaaaatatagattaagtaggtgctagattctttagaattcatgacaattgctaagtgatgttggtacaaataatcataaactactaatttttgttgcagttgatacttcggtggaacatttagcgttgaagcaccgcgataattattttgataacccgccagcatcgtttgcactaactttttggaattttgcaaataatcttgaggcgaatcaaatacttcaccattttgtacaccggccaaatactcagcctgtttattcagattattaaaagtttgtttgtaatccttttttcgtagcaaattgctagaaaaataatctgcattaacatgaactgactcattgtagtctcgccattgacggtagccatcgttgattttctgcttttctacaaccagtacagcaaaaatcatgcaaagtaccaataaaacagcaagcaacatattctttttcgacttacgtgcaattcgaaaagtggcttggaaatattgcgatctcatttttctttctccacataaataattttgttactaaaataacccttaggctaatcctaagagttacattaattattaaaattatagtataaacattaaaaaaatctaatactcttcatatttgaattaagtcttcatatatgactatggcaatctgctagatatttcgtttagtccattctgattcaagaaatctaatatctgttgactttgctttttattgccttgaaaatatgccttataaaaattagtaactatcacatatattccaaaatccggaatattagctaattcttctattatttcataaccatagcttgcatcttgagactgtaaaatagtttgtgtaaggatgaatgattccttaaatttatttctttaaacattagaaaaaggagttcctttctcgtatgattggtttgaacaaaaaaacacatacagaaagaagaactccttcatgaatgattttaccaaagattttgctcaagctctattcaatccagacaaaataaatgatttattgcgcaaagaactacaacaggctgttaataacttgctagaagctgaattgactgcctttctgggctatgatccctatgccagaaatggctggaatactggcaactctagaaatggtgcttatttccgcaaagttgatacgcaatttggcccaattgaagtgcaagtgcctcgggatcgcaacggtcaatttcatcagcacacgctgcctgactacaagcagcactcggatatcttggaaagcatgattatcaagctttactccaagggcgtgaccaccagggaaatagccgatctaattgaaaagatgtatggcagccattacagtccagctcaggtatcaaatatttccaagcagatgattccaaaggttgaggcttaccacaaacgcaagctaagcgacaagtttttctgcgtctatttggatgcgacataccttcctttgcgccgagaaacgtttgagcgttgagcgtgaagcagtctatattgccattggcattaaacctaatggacataaggaagtcattgactactgcattgctcctagtgagaacattgaagtctggacagagatgcttcaaaacatgaagtccagaggcttgaagcaagttgaactctttctttctgatggtgttgttggcatgaaaacagccttggccaggacttatcctaaagctcattttcaacgctgtttggttcatgtcatgcgcaatatctgcgctaaagtacgcgtcgacgatcgtgaaaagatcatgaacgaattcaaacaggtgcatcaacagacaaacaaagaagaagccacagctgtcctgcatgacttctataccaaatggggcaaggtttacagccatgttatcagaagcttgaaagacatagaaccagatctgctggtcttttataactatcccaagcagatcagagcttcaatttattcgactaacatgattgaatcatttaacaatgtgatcaagcgcaaagctaagcctaaggcagagtttccaactgaacagtcgcttgatgcttttattggtattcaggcaatgagctacaatgaccgttatttcaatcgaattcataaaggctttggtcaggttcaggacaccttagaatcctactttgattaaataaataattaaaaaatcaatttacgagaaagaactatttacacaaaagatttgacagtttcgactacaatcatttgtataacaattatgaaaataatttatgcaaatcgatgcaattatcttttgagtattaaatggtaatttcatcaacttccctttacatgttttttccagtttttttacaaaaagaaccagctcatcaaaatcaaacaaaagcattgaattacaaaaaagttgtaaggttgtaatatttttggtccaatcatcaacttcaaaaaattttctcttaatttgtgtaatttctctttgagttaaatcattaatcttattatttacaactgcatcaatcaaacgagctgatattttagtattttcatccatagctgcattttgtatttttgggactaacatactgattttctttttatcatgaatagaatatgcattaagtaattgaacttttaagtcttcctctaaattattattttccttaacatttagtttatttaaaaattcttcttcactaatgttattagcagctaaaatctttagtaaatctactgctactatttcattcttacctcgtcctacttttgaataaaacgattcactaataatccctttaataaattgttcctgtgttaatcctaaagaccgtctttcctctttcagcgcttccccaatactttttgacatatatatccacctcatttcactaaaaataactcagttcaaatcatacgaatgacccgaactgagctatttttaccttaatcaaattgttctaaccaagctggcaattcttggagcaattttcgcactgcattaccacgatgagaaatctcattcttttcatcagtagtcatctgtgcaaaagttttttctttttctggaatataaaacaatggatcatacccaaaaccatcttcaccacgtggtgcggccaaaatacgaccactgcaagtacctgacacaaccaagtctttatcaaattcacctggcatcgaaactacaatcgtagtccaaaatttagccgttcttttttcatccggtacaccgcctaattcagctaataacttggcgttgttctttgcgtcattgtgagcttcgcctgcataccgtgcacttctaacaccaggctccccatttaaggcatcaaccattaaacctgaatcatcggcaatcgtaggcaacttgctaaactcagctaattcatgggccttaatcttggcattagcttcaaacgtatggccactttcaatcggatgaggcggattgtctaagtcagcattcgtcttaatctcgatatctaccccagcttgtttaaaggcttcttttagttcttttgctttaccttgattaccagtcgcaaataaaatttctttaaccattattcattctccgtatccacatgcttagatgttaaagttgcatcatccatgaatgtccttgctaaatgatcaaaactagttggatcgcctgtagtgtaatattcatgactgactttttcattaccatcactaaacaaaccatcgcgccgcatcacattaaacgtatactgtgcaacttgatctgcaggatccaagatagtaacatttttatcattaattgcttctttaaattctttctgaatcaatggataatgcgtacagcccataattaaagtgtcaaagtcttttccttgtaagggggtcaaactctctttaactacttttaagttggtttcatgatctttttgagcctccacaagtggtgcaagtttaggagcagctaattccgttacctgaatttctggatcacggaaacggatctctttagcataagcatgtgattctgctgttgctttagttgaaactaccgcaacttttttattcttagttgtccgtgaagcggccaaactccccgactgaataactccgataatttgtggatcgatttctgcttgaatcgtactcatagccattgctgtcgcagtattgcaggcaaaaattatcagcttaacatttttatctaacaaaaaatggactgattttctaactagttcaataatctcttctttagttcgatcgccatacggcatatgagcgttatcaccaataaaaacagttgattcattaggcaatttttcaattactttttttgcaacagataggccacctagccctgaatccaataatccaatcggacgattatccataataaaaccctcttaaaatcaaaaatttattttctacttatactagtttacggtaaaataaaaaagaataaaagggatgaacaagtttatgacagaaaacacagaaaacacaaacgagcacgtatattttattaaccaactttaccgcgatttccttttgccaactattttaggcgatgatgacgcctcaattctttattgggctggcaagagaatcgcgcgaaaatatgatttaagtgattatgatgatttagttgaattcttcaacatggctgaatttggtaagctagaaaaagttaaagaaagacgatcatttactacttacgaattaagtggccaaactgtcactgatcgtttgaatagcgccagcaaggaattctcccttgaaggcggaatgatcgcggaagcatttcaaaaatcaactggtcgaaccaccgaatgtgaaattaatattttagataaagaaaagaaagttcaatttatcgctcgcttcggttaaaagcaaattgatagactataaataaccactactatatactttagttaaaatcgcatttttttagatatattagatataggagtagagcatgattaaagaatttaaagagtttatttcacgtggcaatgtaatggacatggcagttggtgtaatcatcggtgctgccttcactgctatcgtacaatctttagtaaaaaacttgatcaaccccctacttgggatctttgccggcaaaattgatttttctaacctcgtttttaaggttggggatgctacatttaaatatggcagcttcatcaattctgtcattaacttcttgatcatttcatttgtggtatttttaatgatcaaggctttaaatagagtaatgcccaagaaagaaaaagaagctggtccaactgaggccgactatttagaagaaattcgtgacttgctaaaaaagcaagtaaatcaaaataagtgatatatcaaaaaagcttgaggcaacatcgtctcaagctttttttgatttttaaattaatcagtatattgatccaaaatttggtttaacttttcctttggagtgtaaccagtaattcggtctacaatattgccatccttctttacgattaaagtaggaatagccataatacccaaattcttagctgtatcttgattttggtcaacatccatcttgtagaagttaacgtcttgacgttcttcagataattgatcaattactggtgattgcatcttacatggaccacaccaagttgcccaaaagtctactaatgctacaccattcttagtttcttcttcaaaattttgatcattaattgcttcaaccataattattacctcacattttttcaattcatttatttatattataagtatattctattatacttactttttgcaagtaagacgcttactttaattgtacaattgttgcaccattgccaccttcattagctggtgcataattaaagttctttacatgattgctgctgcggagatattgccaaacaccttttctaatcgcaccagtaccaataccgtgaataatcgtaaccgtatcaagtcctgccagtaaaacagaatcaatatatcggtccaaattagtcattgcttcatcatagcgttggcctcgcaaatccagctcgctatgagcattacttcttctaaccgcactggttgctctaacagtttgtctaggcttagtactttcgcccttttcaatcctctcaatatcgcgatcactaaccttaactttgataattcccatctgaacctcatattcatgttcagataacttcttagtaatcgtacctgtctgaccatatgagaggacctttactcgatcgcctacacttacatggtgacgacgtttttcacgctgtaagaccttattatgagccaaattattagcctgacgctctaaactgttgagttcgcctttagcttcaataatcttattttccttgacgcccatgttcttttgtttttcaagttgagcaataatctcatcagcttttttacggcgtttggcaacaacttcattagctcgctcttgtgcaaaatcaagctgtttttgtacacgttggttataccaatcaagtgcttgttgcaacttttgctccaatttttggctccgatccaaactggtttgcagacgattgcgagccacagtagctgccttggtttgcgtattcaacttggtgatcatcttattaatatcagaatcttcatctgacattaagttctgggcatttttgacaacatcttcacgcatccctagcttgcgggcaatggcaaaggcattactatgaccaggaataccaatctgcaaatgataagttggcgacaaggtctttaagtcaaattccattgaggcattagtcgtccgtggccgattataaccataaagcttcaattcaggatagtgcgttgtcaccatgatcttagcatcttttttacgcaaaaagtctaagatactaattgccaaactagcaccctcttctggatcagtccctgcaccaatttcatcaattaaaactaaggtctcagaatcaacattcttcatgatcgcaataatgtcattgatatgtgatgaaaaagtacttaacgattgttcaattgactgttcatcgccaatatcagcataaacttgcttaaagacgccaaccttgctaccttcttcagccgggataaataatccagactgtgccatcaattgaagcaatcctgctgtttttaaggtaattgtcttaccaccggtgttaggccccgtgatcagcatagtatcaaattcaccacctaaacgaatgtcattaggtactaccttttctgggtcaatcaatgggtgacgcgcttttaataagttcaaagaatggtcttgtgtcagacgaggctcacttgccttcatttcttttgctaacttggctttagcctgcaagaaatctagttcagttaatgcagccgcaatattattcaaactagtaatttcttcacgagccaaattagataagtgcttcaaaatattacgaatttcttgtttttcttgagcaattaaattctgttggcggttattaagatttaaaacggcttccggctctataaacagtgtttgaccactggcactttgatcatgaactaccccaccaaattttgcccgatattcttgcttaactggaataacatagcgatcatcacgaatagtcacaatttgctcagataaatacttactactattgcccttagtataagcatccatcttattcttaatttcctcttcattagaacgtatatcatgacgcaaacgagctagttcatgtgaggctgtatctaatacctcaccatcataatcaactgatttctttaattctctaaataaaagatccggcacatctaattgatctaaaatttcatcaattgcagttaaatccagtttgtttggatctatttctgccaaaaagtcattaatttcatgagctaaacttaatactaataataaattacctaattccttagcatttaaattagctttcacgcttaaacgtttagtacttggacgtacgtcctgaaagtccgttaaaggaagttgtcccttaattcgtagcaaattagtcaaagctaaagtctgctttaactcattttgtacttgttcaaaatcaccactaggtaataattcctccgcttcttttttagcgggaccagtaatcgctaatttactcaagcgcttagtaatttcgccaaattctaaaatctctaatattttcttgttcatttttatcttttttctaaaactaacaaaaaggaccagccacagccagtcctctttttattatttaccactcaagcggtcatcatctaagaaagtatttaaaactccctggaccatgtcccactcatcatcagattcaatctcatgcaaatcactacttgttacatcgccggcatcatcggcatcataactgaaagcttgcacctcaatatcttcatcatcgccaacagcggctggataaagaagcacgtaagatttgtcataatcatctgaatgaaaagtaaataatatctcatacaattcttcattaccttgatcatcaatcaaagtaatttgacgatcttgatcgtcaccattaacttgtgctgccattttaatcctttcggtgtaaatctaaataattttgcaagatgagcaccgctgccatctgatcaattacttgtttacgcttcttgcgatcatggatccctgcatcctcaacaagtactcgtcgtgattcaattgttgtcaatctctcatcagaataatgtacaggtaaaccaaacttttcctctagtcgtttgccgtatgccttacttctagctacggaactaccagaagtaccatccatattcttaggtaaacctaatacgaaaccgtcaacttcatactgtctgactagcttcttcaatggacgcataccaaagttatatctgctttcatcaatctggatagtctccaacttctgggcagtaattcctagctcatcgctaattgctactcccacagttttagaacctacatctaaacctaataaacgcattatttattcttaccaagataactcttaacaagttcttcaataatctcgtcacgttcgtgcttaagaatcaaattacgggcatcgttatgccgtggaatataagcaggatcgccagaaagtaagtaacctacaatctggttaataggattatagcccttttcttcaagcgcattgtaaacatcttgcagagtatcataaacattttttcctttgttctgattaaagtcaaaatgcatagtcttatctagcgaactcatatttattcctcctgtcaacaattttacttgaaaaaaagcttaaacacaattaattaattcttagttcttagaaatttcgtcaataactgccttaatagcatcattcaagcctgctggattcttaccaccggcttgagccatgtttggacggccgccaccgccacctccaaagattggggcagcgatcttgattaagttacctgctttaaggcccttgtctaatgccttttggtctaaagcaataatcatattagccttgccagcattttcagcagctaaaactaaaacatcagacttgttgccgctcttccagttatcagcaagttcacgcaagtcattcatcccgttaacatctgcagtagcagcaatgacagtcaagtcaccagcttgtttaacgtcattaaagatttgaccagccttagcagcattgatcttcttgttcaaagtttcaacttgcttttgagcatcgtgcaaatcactttcaagtgaatcaatcttatcgacaatgttatctggcttggttgccttaacttcttcttgaatatcatcaagtaagtctgaacggtttgccaagtattcataagccttcttagaagttacagcttcaattctacgcataccagcaccgacagctgattctgaagtaatcttgaagattccaatttggttagtattgtccacgtgagtaccaccacagaattcacttgagaagtcacccatttgaacaacacgaaccttatcaccgtacttgctatcaaagagggctaaagcacccatcttttcaccctcttcaggggtagtgatagtagtcttaacttgaatagcttcccaaatcttttggttaaccaattcttcaacggtcttaagctcacgcttggtcattggttccattgcagtaaagtcaaatcttaagtagtcaggatcaactaatgaaccagcttggtgagtgtgttcacctaagacttgacgaagagcagcgtgaagaaggtgagttgctgagtgagagtgacgtaacccttcacgacgttccttatctaacttcaatacgtattcttgacccttttcaactggcaaaatcaaatcaacaaagtgcaagttttggtcattaggagcgtgttgtacgtcagtaaccttggcaaccaattcaccgtcttggttgtaaatgtcaccgtggtcggcaacttgaccaccacgttctgcgtaaaatggagtcttgtcaaagaccaaagtagcatgttcgccatcggccttatcaaccaacttatcatcaacaacaatgtcaactagctttgcatgtggttcttcgtaagtatcacgttcaaagactgacttatccttaatgttcattaaagttacatcttgacgtcccattgattgaaggtcaccacgagctttacgtgcacgctctttttgagcagccatttctgcatcaaagcccttcttgtcaaccttaaggccagcatcttgtgctgattcaaaagtcaattcatatgggaagccgtaagtatcgaacatcttgaaggcatctttacctgaaatggtcttatccttagaattctttgccttgtcgattaagtcgtcaagcaaagtcaaaccagtatcaagagttgattgaaatctttcttcttcgttttggataacgttttcgataaagccgcgttgatccataacttctgggtagtgactttccatgatttttccaacaactggaaccaacttgtaaaggaaggcacccttaattcctaagcgttgaccattcaagtctgcgcgacggatcaaacgacgaagaacataaccacggcccgagtttgaaggaagcgcaccatcagcaatcgcaaaacttacggcacgaacgtggtcagcgataatcttgaaagcagtagtgtcttccttgttaacgccgtacttcttgtcatcagtcatttcttcagtggcgtgaataattggcaagaacaagtcggtttcaaagttggttggtgcatcttgcaaaatagaaagcacacgttctagtcccatcccagtatcgatattcttgtgtggttggtctacatatttgccatttggcaagtggttgtattgtgaaaatacgatgttccaaatttcaaggtaacgtgcattttcaccaccagggaagttttctggatcgtcttcagcaacgtcgttgttttcttgaccacggtcgtagaagatttcagtatcaggaccacatggaccttcaccaatatcccagaagttatcttccaacttaacaatatgatcagctggcatccctgcctttacccaaacattaaatgagtcttcatcttttggataaacagtacagtaaagcttttcctttggcaagccaagccaatcaggactagttaagaattcccatgcccaaggaatagcttcatctctaaagtagtcaccaactgagaagttaccaagcatttcaaagaaagtttggtgacgtgcagtcttaccaacattttcaatatcgttggttctgattgacttttgagatgaagtaattctgtgattttttggtacaactgagccatcaaagtacttcttcatggtagcaacacctgagttaatccaaagaagagttgggtcatcttgtgggattaatgatgcacttggcataatcatgtgaccatgatccttgaagaagtctaaaaacatttggcgaaactctgaactatttagtttcttcattaaaataaatctccctaaaaataaataaaaaacactattgctttcttcaaggacgctccacgcgcggtaccaccttgattgcaacagtgtttgttacctcttgatattcttaattatgaaacttaaaggagcattttttgactattattaagccattctcatctaactggctctctctttgaaataattgatcaaaaaacatatcttaagctgaaataattgtactacaaaatccgcttctgtcaaagcccttgttcacgcttgcgctttctcaaacgttttgccttacgaacctcatgacgctgttccaacttacgtttttgacgattatcctcttgaatcgcacgcttaatcttcttcttgtaacctggcttacgctttctcttctcttttttaacgtaacccaccagcttggtatcaagcttacgattcttgctttgacgattttcacgactgcgatagtgtttacgtggcactaattcaccattcttaatctcaacaaagtcaaaatgaacacccattttttctaggtcttcaatccggttcatttcttcttcacgaatcaaagtaatggcgtgacctgacaaaccattacggccagttctaccaatccggtgaattacaaactcaatatcacgtggtatttcataattgacaaccagactaacaccatcaatatctaagccacgagcagctaggtcactagctaccacatattgatactgtccttgctcaacctgacgcagagtacgctttctttcacgttcagttaccccaccgtgaattttagctaccttcaaaccctgatcttgcaaataattagtcaactcatcaaccttttgcttagtgttagcaaaaaccaacgccaaatatggttgtcccatagttaacaatttgtacaagacattcttgcgatcctttgagccaatatcaagcaaatcgtttttaatcgttggcgcaataacactaggattatcaataacgatatcatcaggatgagccatatatttgcgtaaaaagttagacaatttaactggaatagttgctgaaaaggcagcaatttggacatccttcggcaatttagcagcaacttgatcaatgtcgttcaaaaagcccatgtccaaggtcatgtcagcttcgtcgataacaaaagtttttacttgatcaactgcaaaaaccttcttttgaacaaagtctaacaaacgtcctggagttgcaatcaccaattgtggagtattattttgatacttttctaattgacgttcacgatcagttctgcccgcaagatgtgcaattgaaaaatgcatccctgccgcatcacggagctgccgtgctacttgataaagctgatcggctaattcacgactaggcaaagtaacgattgcttgaacatagcgtttatcttcttcaatttcattaaaaattggtactaaataagcatgcgtttttcctgaaccggttgctgcttgcactactacactcaagtcagacaacatagcaggaataactttctcctgcaccttagttggcttttcaaaatggatcttctttaaaccagcctgaatagctggtttaattcttgaatctataaaaatattattcatgatcttctttaaacttcttagttacttcaacgacttccgcaaatacctgctttacttcgtccatatccttagcgttagcaccactagctaatgcatgaccaccaccatcatgcttagcagctaattcattgattacagggccctttgaacggtaatgtacgcggaaagtaccatctggtttttcaacaaaaacattccaagcaagcacatctttaatacgtcctggagtagatacagcaacatttgcttgatcatcagtcaaacctaacttcttcaagtctgactgcatcaaaattgtaaaagctgcaccaacgggatcaatttccatcttgtccattgccaaggcttgcaattttgcctcatcaaaagttacatcagcaatattacgagcgatttcagtaatgttaattccagtagaagctaattgagcagccaccttaaaagtatgctctgaagtttctggatacatgaaacgaccggtatcgcctacaattccagcataaagtgggtaagcaacttccttggtaatcttaaagccctcttcattcaagaagtctacaatgatttggcatgctgctggagcatctggatctacgtaactcatatcagcatatggatcaacatctgggtggtggtcaatcttaattaaaaagtcacccttatcatacaacttattagaaattcttggtgtattagcggtatcagtagtaattaccaaagcaccttcgtaatcagttgccttgacttgatccatgtggttaatccaagctaagtcgccttcatcgttttccccagcacaaagtatgcgcttgtccgggaatttttccattaatgctctagctaaaccagcttgtgaaccaattgcgtctggatcaggactagtgtggcggtgcaagataattgtaggatattgtaagattttttcataaatgtcatcaaaactactcatttttaatctcctcatcttgtaaaaatatctgtatctagtttaccagaaaaatagctttatttattagtcgaacaaactgattgattgatattttttcttttcaaagtcagttacagtgactcccaataaacgaattccatcatctaaaaaggaacttgttgcttcgaacaagtcacgagccacatcataaaaatctaagtgactatcagaaggtgttttcaacttttttctcttggttaccgtatcaaaattattatttcttactttaataacaacagtacctgccttaaaattgcgtttttttaatgctgcttccaaatgattgcaatagttacgaatattggttagggcttcatcctcagtataaattgcaggctcgtaagtccgctccatgccaattgattttcgattagcctctgagtctgtaacaacaggtcttaaatctattccacgtgcatgttgggctaaaatataccccattttcttaaattttttaattaaggttaaaacctcaattttttgtaaatctgccccagtataaacacccatctgatgcagctcttcttgcgtcttcggtccaataccaggaaacttctcaatcttttgcattgctaaaaagttctgcacttcactaggcaaaattacggttcgaccaaacggtttggcgtattctgatcccattttagctaaaaacttattataggaaacgccaaaagacgagtttaagcctacttcttgccgaatccttttctgtaaatctaaagcaatttgaactgcagactcctgctctatctttggatgtgtcacgtctagataagcttcatctaaagccactgattcaacctgatctgtcacatcatgcataaaagaatggattttagctgacactgcacgatatttatcaaatcgtggtctagtaaaaactattagctccttgggaaccaaacgtactgcttgaattgcggccatagctgaatgaacgccatacttacgagctacataattgcaagtagccactactccatgtccaccattttgtcgtggatcttgcccaacaatcaatgccttatttttccattcgggatgctcccgcatttcaaccgaagcataaaaagcatccatgtccagatgaataatccgacgatggatgtcattttgcggtaataaattttctttattcataaatccaatgttcagttggtgactcaaagattgtattagcttcctttggccccattctgtatggcaaatattgtgcaatggctggattgcctgcttcattttccttctgccaagcatcttcaactgcatcgataaattcccaataacgcttcaattcgctccagtgcgtaaagttagttgaatcattgacaaaaacatcatgaagcaatctttcataaccatcaggtaccttagccatttcggcttttgaaaattcataagttaagttttcacggcgaattcctggttggtcaattcgtttgccattaatagtaaagtaaatttcactagttgggtcaatcacgatcgtaatattgttagaatgagcttgcccatatggattattaatatgctttaaaacaatgtcaatccggttcttcttttctttaaattccttacccgttctaaagtaaattggtacgccagcaatttgtccctcattaaacttaactttacctgcaacgaaggtttcagtagttgactctggatcaacatttggctcttgcttataagcaaaagtagtatcactacccaaatattgaccacgaacaaagtatttcttgacatcatctggcgtaggaataattaaactcttaagcaaatcttgcttggcttggtgaacactagcagaagaaagatccttaggttctggcattgctagcagagtaataatttgaaaaatatggttttgtaccatatcacgcaaagcacctgaagtatcatagtaacctccacgtgcttccacgccaagacgttccgccaaggtaacttggatattcttaatatacttgctgcaccaaatattttgaaccattgggttagtaaaacgcattggcatgatattttgaaccatttctttacctaaatagtggtcaattctaaaaatatcattttcatcaaatgaagccgtgatttgcttatttaattcctctgctgaagccaaatcatgaccaaatggcttttcaactacaattcgattaaagccactaccagtcaagtcttggtcattaatatgcgttgctattgtgccaaagaatcttggtgccatagccatgtagaagagacgattgccttgtgcactataacgatcatcgagctcttgtgccaagtttttcaaaatctcatagtgttccacattagttacatcatgtgattgataataaaaatgacttgcaaaagctttcaactcattttcatcaacagtatcgtgcgtttcatgaatagcatcactaacctgctcacgcaaatactcatgtgaccaaggacgacgagcagttccaattactgcaaagttgtcgtgaattaagccttgttcatacaaattaaacaaagctggataaagcttgcggtgagccaaatcaccactaccaccaaaaagaatcattacaacgggaatattcttcatttcagatccctttctttgaactaaaattatcacttctattttacaacaaggatttttttagcaaaacaaaaagcgcctaaaatgacgctcttaagtaatatgattacttatcctcttttttagtttcgtctgctttttctttcggcttttctgctggagcttcagccttagtttcagctgcaggagttgctggtgcagcaactggaatcacacgacggacagccattctttcaaaagttaagtaaatgccatctgcatcaaccacgatagtcttatcactgttgatcttgtcaaccttaccatgcaaaccatcaactaagatgacttcgtcacccttcttcaatttgtccatcatttgcattctttgttgttgttgcttcttttgaggacgaatcataccaaagtaagtgaaagcgatcaaaataataaataaaccgatcatcatccagttgctacttgctgcagcaccggcatttgctaaaaataaaatgttcaaaatttccacctcattaaaattattttctagatattataaccattatacagaaaatgggactatttatcacctggaattggtaatcctaactgtaaatatgctttatccgtcaccattctgccacgcggcgtgagtaaaataaaaccatgctgcaacaaatatggctcatatagtgactcaatcgtttccatatcttcaccaacattagctgccaaagtccgaataccaacaggaccaccattatatccttcgatcatcgttctcaataatctgcggtctgtctgatcaagtccctcatcgtcaacctgcaattgttttaacgcgccttcagtagtctcgagcgaaattgttttttctcccttaacttccgcaaaatcacgcacccgcttaagtaagcgattggcaacacgaggtgtaccacgcgagcgtcgtgccaattcatgggccgcctcaggcgcaattgaagtgtgaaaaacatcacttgaacgcaaaacaatttgttctagctcatcgatagtgtaatactgcatgtgctctacgatgccaaagcgatcacgcaaaggtgctgacaattgcccagccaaagtcgttgccccaattagagtaaatggtggcagcggcacgtgaactgcatgagtagtctgcccctcgccaatcacaatatcgatatagtagtcttccattgcagagtagagtacttcttctactggcttagctaaacggtgaatttcatcaatgaacaaaacatccccaggatctaagtcggacaaaagtgccaccaagtcgcctgccttttcaatggccggaccacttgtactctttaaatgaactcccaattcattggcaattacgaaagccaaagttgtctttcctaaccccggtggtccataaagcaaaacgtgatctaatgcttcatcacgttggcgcgccgccttaatataaatgctcatttcttttttgacccgcttttgacctaagtactggtcgagcgtttgcggccgcaaagaaagttccatttgttgttcttcaggattctcaatatcacctgaagttacttgatcttctgccaccagtttcacttccttaaaaaataatcatctgttctattataccaagatctactttttaagcagtaatgctaagccctttttaatatattgatctgcagtatttgcagcaactttctccagtttaggcgtgatccgatccacttctttttgggtataacccaaagcaattaaagcaagcagtgcatcatttaatgctggcggcacattctcaccattgtctggacgatcaagccgagcaacataatcacctaatttacccttcaaatcaagcacaatttgtgaagccgtctttttacccacacctggaaaacgagttaggtacttaacttcaccttgttcaatcgcttccgccaaagaattactatcctcagctgccatgattgccattgcactcttaggaccaatcccgctaacactaagtagttttaagaacaagcccttatcatcttgactttgaaaaccatataaagtaatgccagtatcacgcaccacttgctcaataaagaccttagctttttggccttgagtataggcaaaaggtgtaggactatagaccttgtagccaacgcccccgacatcaactacaacatagcttggtgtaaccacagtaatcacaccttcaaaatattcgtacattattcatccttcttaaacatttttctcaattcattttggctcattctaaccaaaattatccgtccatctgcatcatgatatggatcagtacacttgcgtaaatcaagtaaaatttgctcagcttcagctgcagataatttaatcttgccagtaatttctcgcttagcttgcattgctgctatccggctaaacaggttctttgcctttcctttatccacattcaaataaccatctaaaatcttccgaattgaatcttcgacattatcgtgaatccaagttggatacgaacgaacaataaaactattttgtccaaaatcttccaaatagattccaacctgcttaatctgttctacttgatccttaatttgcataaaatcaagattaccaaattctaaaataattggtgttaacaaaccttgttgtactacttttttggcagttatcatgtgaaaaatttgctcaaattttaaccttcgtctagcagcaacctgatcaattaaaaataggtcgccattatgttgggcaaataaataagtatcggtctgtccaacataaaccaagcgaggcagattattagctaaagtttcatccccacttgaaatgacttcctgattagtcctagttgtaggaaatggcgttagtgcttgctgcagagcaacattttgtttccaggtcttagtaacgatatattgatcatcttcacgtggctgattaagatcaacatatttcttttcactatcctgctttaccgcctcattttgaatattatcttctgaatcatcagattcaatcgttaaaaattttggcttttcttgttcgcgaatttccggttcttttttacgagctgtatttacaacatcttgatttaagttaaaactaagctgatcaactagcgtatcacgtttattttccaaattagcaaaagcgctaatttgtccaactttttccacaagtgtattactaattgcactggtgattaaacgacccagttctttttccttggataaacgaacttcctgtttagtgggatgcacgttaacatccactaacaaaggatctactttaattgctaacacaataatcggataatgccgcgctgctaattttgagccatagccatccagaatcgcagtatttaattgaaaatttttaatatagcggccgtttaagagaatcgaaataaaattgcgtgtagaacgtgttaattccggtttagacatcagacctgtaatcttaaaatcgctgtcttttgcctcaaatttttccattttttctgcgatatgacggccatacacgttagcaactgtttgctttaaattattatttcctggcgttcttaataaaattttgccagtatttgacaaagtaaaagacacatgtggataacctaacacaagtcgattaataatatccacaatcttcataatttcagttcttgaactacgcaaatactttaatctggctggcgtgttaaagaacaaatccttgactgtaatttttgttcccttacgagccgctgcatcttcttggccttttttattgcctccactatagttagctcgaataccaattgcgttttcagttgcagtcagaatttccacatggctaacagcagaaatcgaagctaatgcttctccgcggaagcctaaagtggaaactttaaataaatcgtgttcattggcaatcttgcttgtcgcatgtcgggtaaaggctagatcaacttgatcacgtgcaatccccgtcccattgtcttgaactacaatctgtttcaaaccagcatctacaaaatcaacgcgaattcgagtagcaccagcatctaacgagttttctactaattctttaactacgctagctgggcgctcaattacttctccggctgcaatctgattagttaaagtttccgataactcatgaattttgctcattaatcgtcatcctttaaatctttttgccaatcagctaccatttgcataacctgcaacggtgtcttatctgctaaataaagattagaaatatcatcaagtatatcttgttgtgcatcagttattgcgggcttgtcattttgtgtttcagtttcttcaacactgttttccacaggctctgcaaataaatctaattgctgcgaaactggtgctagttcactgccttgtgcttcaagccgctttaataatttagttgcctctcgcaaaacgttgcgcggcaaacctgctaattgagctacatgaattccgtaactttgatcagcaggtccaggtaggattttatgcaagaagattaacttgccattttcttcggtagcaccaacgtgaatatttttcagatgatccagagtctcatccatcactgtcaattcatgatagtgcgtagcaaataatgccttagcaccaactttgtcgtgtaagtacttaacaattgcaccagctaaagccattccatcgtaagtagccgtaccacgaccaatttcgtcaaagagaaccaaactgcgcttagtagcatactgcaaggcttcattagcttcactcatctctaccataaaggtactttgacctgaaattaagtcatcagctgctccgattcttgtaaaaatttgatcaaaaattggcaaatcagcactatcagctggcacaaaggaacctacttgagccatgatcgcaatcaaagccatttgtctcatataggtactcttaccagacatgttaggacctgtaattaaataaatgttggttccttcatccattttgacatcgttaggaatatatgaaccagccgtcattactttttccacaactggatgacggccgttagtcacattaatatcttgattatctgcgtgaaaagttggccggcaataattattttgttcagctactgtagcaaaaccacaataaacatccagcgctgctagttgcccacctaatttttgtaaagcagggatatacttcttaacgtcctcacgcagcttaacaaataaatcatattccaagtcagttgaccgtgtctgtgcctcaagaattagattctcatgttccttgagttccggtgtgatataacgctcagcgttagtcaaagtttgtttacgcgtataacgatcaagtggcaccttagacttgttaccgttagaaacctgaatataatagccaaagaccttgttataaccgacctttaagttatcaatacctgtcttttgccgctcatctgcttccatttcagccaaccatttttttccattgttcatggcatcccgatagcgatcaagctgcggatcaaccccaccttgaatcaggccaccttcagtagtcaacacaggtggatccttcacgatagtggaagtaatcatttcggcaacgccctttaatggatcaatttttttagcaaaatcgaccaagatatctgaatctgattgctctaaagcatctaaaataactggaacggcctgcaaagaacgtgataattgtagtaattcgcgcgcattaacgttaccaaaagcaattcgaccagttaaacgttccaagtcgtaaacaccctttaaggcatcaactgcattttctcgtgtaaagtagccatcaagcaaggcctgcaccatttcttcacgatggttaatttcatccatgtttaataatggacgagctagccactgcttaagcaagcgtccacccatggcagtgtgtgtgttatccaaaacccagaaaagtgaacccatttttttgccagttttggcagaagcaaccaattccaaattattctgcacagtatgtgacatctgcaaatattgatttacttcatagcttttggcaatctgcaagtgcgctaaacttctcttttgagttgaaagcaaatagccaactaactgacgggtagcctctttttcagccccattagtcaaattctgttcaacataagaaatttcagcatgttcaccttcaattggagtaggtcgagaaatcgtaatgttggccttgtgcataaagtctttattttgttcagataatgacccgttatacacaacttcacgagtacgaagtgacaagagctcattggaaacagcatcgaaactctttaaatgagtagcataaatttcaccagtggataaatcactgtaggctaaaccaaagccactcttagtggtaattactgatgttaagtaatttgaatctttagcatcatttgggccttcattcatcatggttcccggcgtcactaattgaataattccccgtttaaccatgcctttggcctttttaggatcctcaagttgttcacaaagtgctactttataacccttttcaactaaagtatttacataagtatccacagccatatgaggcacacctgccattggaattggattcttagttctatttgatcggtgcgttaaagtcaattcaagaatctgtgcacctttaactgcgtcatcttcaaacagttcgtaaaagtctccgacgcgataaaaaagaaaggcatcaggatattgttttttaatttcgtaatattgctccatcattggagttgttttttccgtcatttatgtctctttcctatttcgtattttagatagagttacgtacaatattatacgctacaaaaagaaaaacttcgaagctgaactgattgtttaacttcgaagtcattttaattatatttgtttttgaactagagtgagagtttgtgcataagtttagtgctaaagcactgtaaatgaacttgattacttcgtaatcaagaattatatatctaaatgctaaagcattaagatatataattacatacccattcctggtgcaccagcttgtggagctgggttagctggcttttcttcaggaatttctgcaacaacagcttcagtagtaagcagaagagcggcaattgaagcagcattttgcaaagcggttctggttaccttggttgggtcaatgataccagcatctaccatgttttcccaagtatcagtagcagcattgtagccaatttcgttttcttgcttgagtaagtggttcaaaacaacttcaccattcttacctgcgttttcagcaatttgacgaactggtgctgacaaagctcttaatacgatttggataccagtattttcatctgcagtatcagccttaagatcattgatagccttctcaacgtctactaaagcagtaccaccaccagcaacgtaaccttcatcaacagcggcacgagttgagttcaaagcgtcttcaattctgtaacgacgttccttcaattcggtttcagtagcagcacctacgtggataacagctacaccaccagttaacttagcaagacgttcttgaagcttcttcttgtcaaagtctgaagttgattcttcaatttgctttctgattgaatcttcacgttcttgaatagcatcctttgaaccagcaccgtcaacaatagtagttgagtccttggttacagttacacgacgagcttgacctaattgatcaatcttagtgtcccttaattcaagacctaagtcatcagtaatcacagtaccaccagtcaaagcagcaatatcttgtaactgagccttacgacggtcaccaaagccaggagccttaacagctacaacgttgaaggtaccacgaatcttgttcaatacaagtgttggaagagcttcaccagtaacgtcatcagcaatgatcaataatgacttaccttgttgaacaatttcttgaagaagtggcaagatatcttgaatgtttgagatcttcttgtcagtgatcaaaatgtaaggattatcaagatctgcttccatcttatcgttgtcagttaccatgtattgtgataagtaaccacgatcaaattgcataccttcaactactgaaagttcagtgttgataccacgtgaatcttcaatagtgataacgccatcgtgaccaaccttttccatagcgtcagcgattaagttaccaacttcctttgaagatgatgaaactgcagctacgttagcaatttggtctcttgattcaaccttgtggctaatcttgtgcaattcattaacagcagcttcagtagctttttcaataccacgacgaatgccaactgggttagcaccagcagttacgttcttcataccttcattagtaattgcttgagtcaaaacagttgcggtagtagtaccgtcaccagcaatatcattagtcttttgagcagcttcagcaacaagtttagcacccatgttttcgtagtgatcctttaactcgatggactttgcaatggtaacaccatcgttagtgatgtcagggttgccgtaactttgttccaaaacaacgtttctacccttaggaccaatagtagtcttaacagtatcagctaacttattaacaccctttaaaagagaacgtcttgcattttctgagaatttaatatcttttgccatagattatctatgctccttaatttacttaattatcgttggaaattttaactaaattacttagcaatagctaaaatgtctttttcgtgaaggactaagtacttttcaccttcgtattcaacgtcagtgcctgagtatttatcgtaaagaactacgtcacccttcttaacagccattggaatcttttcaccgtttgatgcgtaagcaccttcaccaacagctacaacttcgccttcagttggcttcttcttagcatttgatgctaaaacgatgccaccaacagtttcttcttcttctttcttaactttaacgatcacgcgatcaccaattggttgtaacacgtttagtcccccttatgtttaattttcttcattatattttttattactgtattaatcattagcactcttatttgctaagtgctaacttacaaatatgataataaactgttttgtgaaaaaaagcaagaaaaaattagcacttttttcaattgagtgctaattttgatttttcttaacttttttaactaattacagtaatcaaaccatcaataatgccgtaagttaatcccattacatagtacttcttataagcatcccagaaatcatggcattctttcttatctttaccatcaataaaaaaatatttaccactttttctgctgctaaaagtcttaaccaaagcatagaaaacagcaactagcgccataataatgaagaggatgattgggaagaagtagccaataatattttgtaagttatatgctacacctgctgcaattaccactaatagataaattacagcaactagtggattgcagatcaaacgtggcatttttactttaaccgacaataacagcgataaaagtagcggcaagcttaagataattattaaaactaacacgtaaatattattgatctcttttaattgagacgcaaaagtatgatcaagcttaccccagaaaatacttagaatacctactacccaatagacagccgtcataatccagacatgtttaagcgtgctgttctttttcattcttattatcctttattgattagcaaaattatagcatagagcatactatttaacggggcgagcataagtgattcgacctttggccagcttatcgctcagtgagctacctaaactagagcggtgcacatcatctacacctaagttgccgccctcttcaataatttgcgtgtcccaaccatcatatttgccatcaacaattgctgcatgtccgttttgaccaacaccattgccagtattaacaatcacaatatcacctgggcgaatattcttggcagaaattttcttcaaatagccatgagtacttttagcatctcgttccattggcagagtaaaaaatggagcatttcctacacgatatcctgctctcttcattacgatccacacaaatcctgaacaatcagttgaaccgtttttattaggatgacgccaactgccaaaattagttcggtatgcacctgttccataagtgaaatagcctaataatttacgagcattcttaatcactctattatgatatcctgaatcatcgaacatcgctggagatggatcctcattaatgttgtcataccaagctatgtcaaaattcacatcatcagagcttaattctgttgactgatctgaatcatcattcacatcatcttgtgcctgatatgcctcaagctttgctttttcttgagcataatttaaaacattattttgtttaatgtatgcgttaggaccgatcttataataagcagtaccattaatcgtcttagttccttgcacattaatgaacttgccttcatatagttgtgattcaattactggaacattaccggtttgtatctgaccacgtgtcttaaaactggtcctcttaccattactcttatacacattagaagtagttttaactacataatctgtcttaggattaggcactgttatcgctgcctttattttagagctagttagattaatgctaaagacagttaatccagttactaatactccaataactccactttttaacttcataaaacataccctcactttgtttttctttatagagaacattttactcaaacttaaaattgaagtgcaacacttagtactaaaaaacgccaagaaacaatctttcttagcgtcttttattctaattgttttaattttttctagaggagtagaagaaactaattgtgtgcagtaacagcaatcaacttgtcgccgtgcttgtcacccgcatcagtaattcttgaaacatttgcatagttggcagtgttagtaattactaccatgacagtagtatcatagcctgcctttttcacagcatcaaggtcaactgtaccaagcttatcgcccttgttaactctttgaccttgcttaacgaaactttcgaagtgctcgcccttaaggtttacagtatcaagaccaatgtgaatcaatacttctgcaccatcgtctgacttaatgccataagcatgcttagtttcataagcaatagtcacagtaccagtaactggtgaatagatcgtaccatcacttggaataacggctgcaccatcacccattaacttagcagagaatacttgatcattaactttagttaaactctcaggagtaccatcaactggtgaagcaataacttcatcctttaatgccatttgttccttaccaagcttttcagccttttgagtttcttcagcataatcagttgcgtcgtttactggaacatcttgttcagcaacttcttccttcaaatgacccttaccataaacataagtaaggatgaaggcaacagcaaaactaattaatacggaaacaacccacattggaatagtcttaggataaattgaaaggaagcctaagaaaccagctgaaccaagagcggctgcagtaacatgcatcaagcccgcaaaagcagcagctacacctgaaccaattaaggcacagaagaatgggaatttatacttcaagttaacaccgaaaagtgctggttcagtaataccaagaagtgctgaaacacctgatgaactagccaagcccttcatcttcttgttcttagttaagaagtaaacagcgaaagttgcggcaccttgagctacgttagccatacatgcggtaacaaagataaagtcaccagagctggctggattcttagcaaaggctgctaaaagctgagtttcaaccgctggaaaactttgatgaagcccagtagtaacaatagctgaataggtaagaccaaagacacccatcccaaaggcaccagtagtgtcatatagccaaacgatagcattggtaataccatctgatacgcctttgaagactggcccaataattgtaaaagtcaaaaagccagtaatcataattgaaagaagtggcgtaaaggtaaagtcaacagctgatggcaagtgcttgtggaagtacttttccaaaattgacaatacccaaacagctactaaaactggaataacctggtattgatagttagtttgcgcaacatgcaagccaaaaatgtcccagaagtgatttgcaccaaggagtccaggtgtcgtcataatcattacgattgtagcacccaagaattggttagcaccgaaccgtttagctgccgacattccgactagaattggcataaaaataaacggagctgctgacataacttgaatcatacttgaaataccagcaacattcggtaccatctgaacaactgactttggtccaaacagacctggtgaagtcaagaagttgttcaaagccatcaacaaaccaccagcaactaaggctggaatgattggaacaaagatgtcagacaaaagtttaatgaaatccattactggattcttctttttaccttctgcagcaaccttcttcaaatcatcggttgataattctttcaaaccagtgattttaatgaactcatcgtaaacgtcattaacatctcctggcccaataattacttgatattgaccattggttttaaaagtacccttaacatctggatcattatccaatgctttttggtcgacttttgaatcatcttttaatactaaacgcagacgagtagcacagtgggcaccggcaataatattgtcacggccgacgtctttaattactcgttcagccacttttctgtggtccatattgatccctcctatgtaaacgttttattctcaattcactaattatgataacgcattcaaaaaatatgtcaatcgtttgacataaaattctttatttattttattacttatgaattaataattattttttctgttaaacgtttgacatatttttcatactaacttaaaatacatgtaaaaagacaacgctttcatggaggtatatttatggaatggacaagagaaaaacgttacttaccttatcaagattgggacgctgatacattaatgcatttgcaagcacaagccgcaaactccccttaccaaatgcgctatcatttgcatcctatttctggcttaattaatgaccctaatggattttcctactttgatggtgcttaccacctcttctatcaatcatatccattcggcgcagttcacggtctaaagtcatggtggcacttcaaatcaactgacatggttcactgggaaaacttaggcttaggtattgaaccagacacaatggctgattcacatggagcttattctggctctgctcgcgaaatcgatggtaagcttttcatcatgtataccggtaaccaccgcgatgaaaattgggtacgtactccttatcaaatcggtgcttggatggataaaaataataaagtttcagacaaaaccatcctatttaagaatccagatcacatcaccgaacattttcgcgatccccaaattatcaaagaaaatgacacttactacgcaattttaggtgcccaagataaaaaggaaaaacacggtcacattgacgtttggaagtctcaggatctaaagaactgggaagaattgggcttcttagactttaccaacgaagacatgggctacatgatcgagtgtcccaacatcgtccgtgttgatggcaaagtcgtggtcattttctgtcctcagggtttagacaaaaaagtagcagcttatgatgacatttacccaaatatgtacgttattgctgatgatattgactgggaaaatcataagttaattaatccaggtaaattacacaatttggatcacgggttcgatgtttatgccactcaggcctttaacgccccagatggtaatgcctacgaagtcagttgggttggcttgcctgacactacttaccctactgatgatgaaaactgggctaactgcttgagtcaagtgaaggaactccacctaaagagtgacaagttaattcaaacgccagttaaggcaataagcagtatccgcaaaaacgaagcaagcatatctaatcaagtagtcagcgatcaagccggccaacaatttgaacttgaattaacaattaaggctaaccaaagtggcactttacatttagctgcaaataatgacttaagtaacagtttacagctcaatttcgataccaaaaatggtaaattagtattagatcgtgctcatgctgggcaaaaagtagcagttgattatggcgaaagtcgagctattacgctttcaccaaatcatgacctcaagcttgatatctttgttgatcattcattaattgaagtattcgttaatgatggtgaaaaggtattgactggacgctactttgccgatcagaccaacaaaaaaattgcgtttgctcaagacattgactacactggcaagctttggcaaatgcaaacaattctttaaacatcaggtgatactatggcagcaaaattaagcgacgttgccaaaaaagccggttgctctgtaactaccgtttcgcgagtaatcaacaaccatggctatttaagtcaaaaaactaaagataaagtttttgccgcaatgcgggaattaaattatcgtcccaattctattgcccgctcattacaaggaaagaaaatgaaattagtcggtttgatttttcctgagatcactaatcctttttttgcggaattagtacaggatatcgaaaccactttattccaacaaaactataaagtaatcctatgcaatgcaggacaaaacaaagaaaaagaacgcgaatatctgcgcatgcttcaggctaatcaagttgatggcatcatcgctggtgcgcacaatctaggtatcaatgaataccaacaactaggtttgccaattgtctctttcgaccgaaagctatctgataatgttccaattgttagttgtgataattatcaaggcatcaagttggcagtacatgacttggttcaagctggttgtcacaaaatttactttctgggcaatgaacacagaaaaggtaatccgactgacgaacgactagcagcttatcttgatgaagcaaaggaatgtcacttttcagcccacattcgttcagttgctttttctgattcttccaacattaaaaatatgaaaattcatgatatgttagtcaatgatcagcctgatggcgtcgtctgcacagatgatttaactgcagtgttagttttacaagaagcaaaaaaattaggcattaaagtgcctaaggaattaaaagtgattggttttgacggaacaaagcaaattcaaacttaccattcggaactatccacaattgctcagccaattcatgatattgcaactttattggttaagttattgcttacccgaatttccaatcccgacgaaaaattgcgccaaaagaattatattttgcctgtcaaattaatcaaaagtgaaacaactgcatgaaaaaaagccgaaaatcggcttttttctacccaaagtcaagtattatcaatgatttaagaaaataaatttacttgttttaatgatgcgaataaggttaaagcaaataagagtttaaatttaagaaaaagcgaaagtaccacaaataagcctatgaatacttgtagtttttccataggttgcttatacttaagttgattatttgatttcagctaaagtcttttattttcggtggctatgttgtaatcatataattgatcatgtttgataagagcaaacattgtgcgtatcagtttatggactgatgcaatggcgattttcttatagccttgtctatttgaagatcgttttttcttgtcataataatcagttatatggcaaggctgcgtagcctttaccgtctccatttgagtaataactcgataaagtatttttctggcaatatgattgccatgcttggtaatgccaagagaactgtctttttcaccagattggtaccttcctggatcaatgccaacaaacgcatcaatttgagctgaagtgctaaaccgtcttagatcaccgagctctgctactaatctcactgctgtaattctagcaacccctgggatactcaaatagatggataaagcacgagcgtttactgctttagccagcttttccatgtagttaattacatagtcgcgttcttgctggagtgaaaataaattagaaatgttcctttgaatagctctaacgataatactatctttggaatcataaggataagcttctctagcaaaagcgtataatcttgtggttaagtaccgtgccctttgttgtcctattccagaaatagaattaagcatttgagttacctgtgtctcattcttttctagaacatatccagcatgtgggaaaagactaacaagcgcccaataaattctgccagatggatgagacagtatttcttcaatttgtgggaaagtggattggaggttgcggtgcaattgatttttagtagtaactatactcctagtaagttcttcataatagcgactggcattctgaagttcatgatactctctgggctgtggatcacgcagcttttgcggggcattaaattgaattaaagccaggcgataagcatctaccttatcagttttattatggcgtaaattattgtccattagctttttcgctttaagcggattaagcttcaaatacttaatatgataatcctctaagaaagcttgcaggcttagagaataaacaccagtagcttcgaaaacaactaaaggagttatcaaatattggttcagttgctcataaagtttttgatagccaaaggaatcattagagattctaaaagattcgccttgtttgatccggtcattaaccacacaaactgtggaagatttactgctaacatcaataccgaaaataatttgtgattccataatataacctccgctgtgaagataaacctctttatcaacctattaattctaattttctaaacacggcatctaagtgcccacagacttcgaagagacttaagaataggtggtaaagcagtccgtttcttttacgacatcaagtgtctaaaaagctgaagacttgatttgctttatcttcactttctattttagacaaaataaaaagtgccagatcgtgaatccgtcgattcatgatccaacactaggttagtatgtttcttttactcaaatttagttttctttgtcactatctaagaaatagatcaacgtttgcaattcggttgctaagtctacattttgtactcgcacatcagctggagctgataaacgaatcggagtaaagttcataattccctttacacccgcatcaaccatttcatctgtggttttctgagcagctgttgaaggaactgtcaaaattgcaattgtaatctgttgatcacttagttgttgctttaagtcgtccatgtcataaacagggacaccacttaagatacgaccagtaatctccttattgatatcaaaagcacaggaaattcgaatattattactgcgcttaaagttgtaattaagcagcgcccgtcccagattacctacacctattaaagcaacattagttaaagtatcttgattcaaaattttcttgaagaagctcaataaattctttacatcatatccatagccacgttttcccaacgcaccaaaatatgaaaagtctcttctaattgaagcactatctacttgaactgcctctgacagctcagttgaagaaaccttatctttgccttcttcatttaaaataatcaaataacggtaatataatggtaatctttttgccgttgcttttgggatttttattttttccatataggaaccctccaaacttaaatgtttgtgaatgtacaatcaagcactactatcatacctgctatgatagtacttatgcaagtatctttttcacaaatcatcattttttcacatatttaacttaaaaacaaacaatttgcgctatatggtagaatagtggttaggtgaaaaattatgattattgcacaaggacacgatttagaacaacaatttggggccaacacattattcaaaaatgttaatttttcaatcgattccaatgccagaatcggcttagttggtcctaacggggttggtaagactaccctgttaaaaataatgacaggtgagcaagaaccaactcacggcgaatttacagttaataaaggcattgatgttggttatatcgctcaggaaaatgcattagatgaaaataaaaccatttgggatgaaatggaaaccgttttcgctcctttaataagggaaagaaaaagcttagtccaactacaagaaaaaattgcagatcatcctgaagatcaagaattgcttaagcaatacgatcaaaagcaattcaactttgaacaaaaaggcggttatacttatcaatctgatattaaaagtatcttgaatggctttaagtttcctgaagacacttggcaaaagaagattggtagtttatccggtggtgaaaaaacacggttagcttttgttaagttgcttttgcgcaaacctgctctgttgttattggacgagccaactaactacttagatttagataccctagattggttggaaggatttttaaagaattacagtggtgcaatcctcgtggtttcccacgaccaatatttcttagatcatttagcagcccaaatttttgaactagaatttggtaaattaactgcttttaagggcaactattcagcctatgtcatgcagcgcgagcaacgtgataaggaccaagaagccgcttatgaaaagcaacaagctgaaatcaaaaaagatgaagaatttatccaaaaaaacttggttcgagcaactaccactaagcgtgcacaaagtcggcgtaaaaaactagaaaaaattgagcggattactccacctaaacataaaaataaggtacggattcatttttcaagcgatcatccttctggcaaggaagtattaattttcaacgatttgacgattggttatcccgataaaaccatggttaaagatatttccttccagattaataaaggagatcgcgtcgcgatcattggaccaaatggaatcggtaaatctaccctgcttaagactattatgaagcaattaacgcccaagagtggctcaattaagtatggcgcatcccttgagattggttattacgaccaagaattacaaagactagatccatctaaaactgtattggatactgttggggatcgtcataagaccatgcctgaacgcgatgtacggtcaatcttagccagctttttattcacagctaaagacattgataagaccgtaggtcaactatctggtggacaaaaagcacggttaactttaactgttttatcacttgaacatgataacttcttactgatggatgaaccaactaaccacttagatatcgaagcaaaagaagtactagaaaaagctttaaaagactttgatggtaccctgctctttgtttcccacgaccgttactttatcaatcaactagctaataagattgttttagttcgcgatgggcatgctaaagtctacgatggcaattattcttattatcttgatgagaaggcaaaacaagcagctatggctgaaaatagtgccgctgagacagaagtcgagccaagcaaacaaattagccagcaaaaactttcttaccaagagcaaaagcaacgtgattctcaaaagagaaagttgcagcgtgcaattgataatgcagaaaaacaaattgaacagcttgaagaacgagagcaagaaatccaaaccgaaatggccaatccagaaattgcttcaagctttgataaattggggccactgcaagaacagctttctgatgtacaacagaaattagatgaagcaaattctgcctgggaaaaggcaatcgaagaaatggacaattttgaataaaagtataataagtaagttctaatatattaggacttgcttatttttatatgcgcatattaaaataacgtaccttattattcaattgtgcctgtatatacaattcaagaggtgtatcttggttttgaaatgcataaacataagcatttggggattttttgaaagaattttttttcgtgacacaagatgtatcacttactggtgctgcacttttaatcgatgctttacaagcaaacggtttaaacaacatgcatggtggtgtcggcattccagttactgactttgcccgtttagctgaattaaagggtatgaagttttatgaatttagaagagaagatgcagctgtagacgcagccgctgctgctggttttcttaccggcaagcctggtgtagccttaacagtttctgctcctggtttcttaaatggtttaactgctttagcagaagccactaagaattgcttcccaatgattatgatctcaggttcatcagatcgtcatatcatcgacctcgaccgtggagactatgaaggacttgatcaatacaatgttgctaaacctttatgtaaagcagcttatcgtgttgaccgtgctgaagacatgggcttagcagttgctcgtgccgttagaactgctatgagcggtcggcctggtggtgtttaccttgaccttcctgctgcaacagttgccgacacagttgcacaaaagtcagacgctcatatctatgaagtagtcgatccagctccaaagcaattgccatcagatgatgcaattgaccgtgctgttgaattattaaagaacgctaaacaccctgctattatcctaggtaagggctcagcttatgctagaagtgaagcagaagtcagagaattagttactaagactggtattccatttttgccgatgtcaatggctaaaggcgttgtaccagatgactcaccatcatcagctgcttcagctcgttcatttactttaggtcaagccgatgtagtcttattaatcggtgctcggcttaattggatgctttcaaatggtgaggctccattgtttaatgaagacgctaagtttgttcaagtcgatattgacgcaacagaatttgattcaaacagaaagatcgatgccccattacaaggtgacattacttctgttttacaaaaattaaacgcaccccttgaaaaagctaacgttaaggcccctcaagactggctagattcaattaagaatgcctgtgaagctaacaatgaaaaatttgctaaaagaatcgctgattctgaagctaagccaactttaggcttctacagtgcaattgaacctatcaataacttgatgcaaaagcaccctgacacttacatcgtaagtgagggtgccaacactttggacattggtcgtaacttaatcggtatgcaaaagcctcgtcaccgtcttgatactggtacttggggcgtaatgggtgtcggcctaggttatgccattgctgcagctgttgaaactggtaagaaagtcatctcacttcatggtgactcagcctttggtttggacggaatggaaatggaaattatctgccgttaccacttacctgttaccgttgtcatcattaacaatggtggtatctacaatggtgaccgtaacccagttaaagaccaattaggacctactgttttaagccacaatgctcactatgctgaaatcgctaaggcctttggtggtgacagctaccgtgtaagtaactacgctgaaatgaaggatgctcttgaaaaggcctacgaatcaggtaatccttcaattattgatgctcaaattcctgaatcaatgggtaaggaatctggtcacattggtaacttaaacccagaattagatttagcacaacttgaagataaggacaattaatcacgactgaagaaaatgaatatgcacctttaaaaggtattaaagttgttgactggacacaagttcaataaggtccatcatgtactcaacttttagcatggcttggtgctgaagttattaagattgaacgtactaacactggggaccctactagaaatgaattacttgatattcaagattcatggagtctttactacttgcaattgaacgccaacaagaagtctttgactttgaacatcaagactgatgaaggtaaaaagattatgtacgacttggctaagaaggctgatgtctttgttgaaaacattgcaccaggttcagctgatcgtaacggttttggttgggaaaagcttcacgctttgaacccaagattgatctatgcatcattgaagggcttcaatgaagattcacgttttgaaaacgttaaggcctttgaaccagttgctcaatctgctggtggtgctgcttctgctactggttggaacgaaggcaaagccaacgttcctactcaatcagctgctactttaggtgactcaaacccagggatgcaccttactattggtatcttagctgcccttcttcaacgtgaacacaccagtgaaggtatttttgtttaccagtcaatgcaagacgctgtattgaacctctgccgtatcaagttgcgtaaccaaatcatgttagacaacttaggtgcccttcctcactacgctgtttaccctaactggaaatggggcaaggcaattcctcgtgctgagaacactgaaggtggccaagttatcggtcggacttacaaggctaaaggttgggaaactaatcctcgctttgatggctggcacaaccgtcaattacacaaggaagaaatttacccattaattgaaagctacactaagcaatacgacaagtatgaattaactaagaagcttggtgctgctggtattcctgtaggtccagttcttgactggcacgaaattgaaaatggcccggacttgaacaaggatggtactatcgtaaccatcgaccaaggtggtaaccgtggtaagttcaagactattggtttgccattctcactttctaactacaagcgtgctccagatcttggtgaaaacaacaaggaaattttagcttcacttggttatgatccagatcaaatcgaaaaattgactgaagaaggcgtaatttctaaggctcaaggtcctaagaatccacgtactgaagttatcaagggtgaataattaatttattctcatcaaaaagctgttcacttcgaacagctttttctttttaaaatagaaagcgcacaactatgacagaacctaattatgctgagctagaagcaaaaaacagtcatttagataaaaacaaaccttatcctttaagcgggatgctcgttattgactttacccacgtcctctcaggccctacttgtaccagaatgctcgcagatagtggtgcccgggtaattcatatcgaaagaaaaacaggcgatgacacgcgtcacatggggccatatatcgcagatggttctagcgaatactttagaatttgtaacgcaggcaaggaatcaatgtaagcgtcatataaccgagtatcttttttagtccgtatttttcaggtattctaatctcatcaatttaatggaggttaagaatatgatcgaaaaacaacaacccattgtggcacttggccgttcttctaaacctaagaaggctcgtccaccacgcaataatctgttgcttagtttaaagaagaatgacttagagctgaatttttacagcagcttagaccctgaaattatgaataagctgcttgagaaagtcttgccatgattaagctcagtgacttagggcaagtctatatcgtttgcggcaagacggatctgcgtaaaggcattgatggactagcaactttagtcaaagaacagtttgaacttgatccttttagcggcaaagtcttcctcttttgcggcggaagcaaggaccgcttcaaagccctttattgggacggacaaggtttttggctgctctacaaaagatttgaaaatggaaaattgaactggcccaggaatcaaaatgaagttcaagctttatcttctgagcaggtcgactggctaatgaagggcttcgcaatcaatccaaaaataaagaacacgaaagcgtgcgaattctactaacacttgacatcgcacgcttttttgatattcttttaactaataaatttaggaggaagtttaactcatgtcacaagaaaatttggaaaagattattgcacaacaagcaactactattcaaaacttaactgatgaaattaagctcctccgtgaacaagtagcttacttaacgcaaaaacgttatggcaaatcttcagaacaaatgcctttaaatggacaaacaagtctctttgatgaacctgatgctcaagatgacggagaacgtccccgacgccgccgttcagactattacttataaaagacaagctcacaaacgaaagcgtgctgacttactagctgcccttccagctgaagaggttcaccatgaattaggcgacaagcattgtcctgattgtcatcatgaactgattgagataggcaagcagtcagttcgccaagaattattgtttatcccagctcaacttaaaaggttagaccatatccaacatgcttacaaatgtaaatattgcagtcaaagaaatcttagcgacaagatcattaaagctgcagtacctaaagctcccctaaaccatggtctaggttcagcttcactcatcgctcattcactttatcaaaaatatgaaatgaaggtgccggactatcgtcaagaaagcgactggaagaagatgggactagaagtttcaagacagatgttaaattattgggatttgaaaagcagtcaatactactttaaaccagtgtatgatctgcttaagcaaaagctgttaatgcggccaattttacatgccgatgaaacttattatacagtcttagaaagtaaaacaatcaagacttactattgggtcttcctttcaggcaaacatgatcaatacgggattacactctatcatcatgatccttcccggagttgcaaggttgccttaaactttttaggaaactatcccggttatttgcactgtgatatgtggcaggcttatgagcaattgccgaaagcaactttagttggctgctgggctcatgttagaagaaagtttcacgaagccgtaccacaacaggcttctgaaaagtcccttgcccaaaaaggactcaactactgcaatcgcatgttttacttagaacaaacctgggagaatttgagcaaacaagaacgttaccagctaagacaagcaaagctcaagcctctgatgcaagagttcttcaactggtgtgagaaaaataaaatcaccgttttgccaggctctaaattgggaagagccattaattataccctcaagcatcaagctacttttgagcatgtcttgcttgatggcaatttagaattatctaacaataaggctgaacgcgctgtaaaatcactcgtcatgggccggaagaattggttattttctcaaagttttgagggtgctactgcaagtggctttattctaagcttaattgaaactgccaagagaaatggccttgatcctgaaaagtacttgaattatttgcttcagaaattaccgaatgaagagattctggattcggaaacccttgaagcttatttaccgtggcaagagaagatccagataaattgtaaataaaagaacttaaataaccgtctcagtataacagtaactgggacggtttttaagtacactattttatttgacgcttacgaatcaatcgccttagatttaaaagatcctaaggaccatgccttagtagaaaaaaatacctagaaataatcgttctaggtatttgatttaaaaagttattctatttaattcaacatgctcttagcatatggcaattcaagtgatggatcagcattcaaagtcaaatccgcaaattgaccattattataaagattatacgcagcagccccaatcattgcagcattatcaccacacaacttaatatctggcaaaatcaccttaggttggtctgctttaggcaacttagcaatttctgcactcatgcgatcacgtaagccatggttggcagctaccccaccacccatgataaaggtcttgggcttatattgcttaattgcgcgaattgttttatgagccaaaacatcaattactgctgcttgaaaacttgcagccagatcatacttattcaacttttcatgaatctgatcagcatgatgacaagtgttaataaaagctgactttaaacctgagaatgagaagtcatagtcatcatcttccatcattgctcgtgggaagttaaaggtatccttgccttcatgagcccaggcatcgatagttttacctgctggatagtttaccccaagaacacgaccaatcttatcgtatgcttcgccagtagcatcatcgcgcgtatcaccgataatttcaaaatgaacaggatccttaagtaaaactatttcagtatgtccacctgaaacctgtaatgcaagagctggatattcaatctcatcttttagttgagctgccataatgtgccccataatatgatcaacaccaatcaaaggaatacccgttgccattgaagcagccttagctgcacttacaccaattaaaagagcaccaactaagccagggccataagtcacagcaattgcatcgatatctttccaagtacaattagcttcagccaaagcttctttagtaatctgactaaccacttcaatatgatgacgactagcaacttcagggactacaccaccaaagcgttgatgactcttaatctgcgttgctacgattaagctttcaatctcacgcccatttttaatgacagcagtggaagtttcatcacaagaactctcataagctaaaatgcgaacatttttttcactcaaaacgtaaacttctttcttttaatctgatgtggttttaaccataaaaccatgttcatagcatcggtatgagtatcatggtaatagtttttacgaatgaaggtaccttcaaaacctaaggaacgatatagcttttgggcaatctcattatctactcttacctctagactaacgcaatcactgtcattttcacgcgcccgatcaataatcaattgcattaagtaacgaccaatatgcatattttgaaaagccggcgctactgcaatattagtaatatgcgtctcttctggagtaaaacgcgcaccaataaatgcaactagcatcgattcataatacactaccaaataaagacaattatgccgcttctctagttctcgctcaaatgaaaacttattccacggtgtccgacctgaataaacttgctcctctaatacaagcaggtcaggaatattgtcatctgtagcttgcataatttgtagtctcttaccgtttacattcgcaataaacggggtaaaactcatatcaatccgatttaactgttgatggaaaaattgattaaacttcttcaacataatgactatctggctcgaatggtttgcctgtctttttatgccagtctacttcagcctgagttcgacgcaagtaacgtggcaataatttatctggatcaactggaaccgcattttcagctaattgtccaattagcccagcatggatgacattctcttcttcagttccataaacatatggaatattcaaagctttaaatttttcatcttgcttttcaagacctgagcccacaaaaacaattttcttaacttcatgcttggccgcataatcttgaatcgccttaattaaaacgtcgatattgtaatgaccgtctggaatgacattctctggtacagcaccgcttaaataaccggccgcaaaataattgtcatttcttgcatctaaaccagtaattaccaaagcgtcttcttgaacgcctttagccaaagcttgtaaagttgagattcctacaacctctttatctaaaatgctggcaaacatcttaacagtagtgattccaattcttagtccagtataagaacctggcccaatagcaactgcaaaacgatcaatatcttttaagcttaaatcattatcttttaagatttcatcaatccaaggatcaagatgttcgctatgattacgctcatctcgttcatttttctcaacaataatttgttgaccatcattcaaggccacgctcaaatgattagtagctgtcgaaacacttaaaattttcattttatacatttttctcttttcgctttaaatcacttttttattttaacacgagaaacggcttgtaaaacaaagtagctgataaccatttgaatccaaggaacgatcatctccttaggtaaacgttggatcaaagccgcattgaaattgataccatacataatatgtagccataaggtattcatgccaatattgacaattacagtcaccagaatagtagaagcaataatccgccaaattttaactggcttattatataaaaacagggcgtagataaatgggcctgccattgctgttaaagtaaaaccaatgaaaaagccaccttgatcgccaaaaagtgcagatgaaattaaatcactaattccaccgccaattgttccccagagcggaccaaagagatatcctaatagcacactcccaatgaaacccagtcccactttaaccattactggaccaaaagaaaactgacttagaataattttcattgcaacaacaatacctaaaaagactagttgctgtaaatccgttcgtaaaattttctttgtattcatttgaccgattcctcccctaaataaaaacaactaatagcgtcatgttgttactatatctcacgccaacttaattcacagacggccttaactgtcccatcttctgcttcaattgcatgagatgtaataataatatcatattgaaccaagtccatgcaagaatttatactctcaccataatgaacttctttatcaaatttaatatcaattgctgtaacaatatgttcttttaaaaagttacgatccaacatatcaacaaaccaactgaaataatgactattagttacatgatgattagtatctaagtcatcgtaacgcgcacggtatgaacgcttttgctcgtattcggtttgcggacgcaatcttggaaaacgtggcatctttttaagtagtggtgcaccccaatcttccatcattttagtatcggttggcaccatatgccgcttcttcaagtcgagcattacccactggctttttacagtcactaatggcttaccgtcttgcgtactaacgccaaaatcacgatactcaaaaaaacgattatagccgctagcttcagtacttagaataacttgatcacccggtttaggcaggtctttaatctcaaaatgatattgagtaacgacccagcctagaccacgcttaaccaagtcatcagtcccagcaccaccttgacttaattgatgctcagaaacctgcatcattaactcaactagtgctggtaattttaaacgccgattttcgtcacaatctttaaattcaatttgatattcttcggtatacttcataattaatcctggtgatattgatcatacaattcattcttagaaacatgatgctgcttggctacctgtttaattgcatctttcttggattcacctttttcaaccaagtcattaactaagtcaattaattctgtccaagatagttgctgaggcgcttctgtattaggtgaaactagaatcacaaattccccgcgtggagcattctcattgaagtaattcgtaacttcttccacactaccccggataaactcttcgtggattttggtcagttcacgtgcagctacaatttgacgatcttttggcagcacactagccaatgttttgaggttttttgctagacgatgcggggcttcataaaaaattgatgttgctctattatcgcgcatctgtgcaaaataggtcttctgttccgatgattttcttggtaaaaagccataataagtaaatggctgattaaaaccggaagcaatcaaagcagttgaaaaagcatttggaccaggaagtggtacaaccggaatatcatgcttaatgcattcttgtactaatacataacctgggtcagaaatcacgggcatccccgcgtcactaatctcggcaatcacagcaccttccttcatcaacttgatcaattccggcgcccgctccttggaattatacttatgaaaagagatcattttattatgaaccccaattttttccagtaaaatcccactagttcttgtatcttctgcggctacataatctgcatcggttaaaacttttttagcgcgaatagtaatatcttccaagttaccaatcggagttggcactaaataaagctttccttcatcttttgcataactgctttgacgtttcattatctaccgtcctttttcttgccctttttttcgccaaaattgtccaaaatatcaagacaaaacatacaatctgcacttggatcacgatgcgagccatagtacatattgcaaatgtggtaccctgaatcataaatcttcttcaatgattccaagccactctgcgttttagtctcaggtgcaggctgatttgccgttaacttgtccagcttctcatggagtaattgattttctaccttcaactccgtgttttcttttaatgtttctaaaatatcattttccaagctggcaatcgtcttggtcatattttctgttgtttcttcaatctttttcagttttgaatatggatccaatctaaacacctacttccattttaaggcgagataatctaacgcattttgtaaatttacgttactcaaacgcattttgtctatttcaattaaattcttaagcattgtcgccgccattattcttttagcaggattacgcaaatcttgctcggccaataattttaactgaagcaagatgtaaccctgctctgacactagcttagcatcagcagctagcttatgtgcactgacaagtgctaagctgttgtgttccagcatttcttgataaaaatatttaattgcctgattccatttatcaagattacccagttcctcaatctctgcttttgaaaaaccattctccagtaagactgcagtcctaccactagccctctcaccattgtcaaaattaatgatctgggtccgtgaacgcaccgttggtaaaatctgatcactattgttagtaatcaaaatcgtaactactggcgctactggttcttctagtaagtttaataaaccgtttgctgcagctaaagttaacttttgtgcttcattaataaagaagaaacggcgagtactttcaactgggcttttggctaattcttcttttaagggacgaatttgatcaatccctagagcctgttttccatcaggcgctactagcaatacatctgggtggttacctgacaaaatttgccgacaattttgacagctgccatccggcttattttcaccagtacaattaaacaaacaagctagccagtatgcagtattcaatgcccgtgcctcatcgctatcaacaaaaagataactatgagctaactttttttggtcatatgctctttttaaaaattgggtttgctttttcccaacattactaagatcaatcatcagaagcgtttaaactcatcaactggaacaacaaaacaagttgcaccaccgactgtcactttcaaaggctgtgtaatttcatacccagttgaaaccatatgtggtgttgcaatttcctctcttgctcgggactgttccttaataatctttaatacatcgtctactttatcgtcatcacaacctactaaaaaggtagtatttccttgacttaaaaaaccacctgaagttgctaacttagtagcacgaaaatcattttgaacaaaggcccgttgtaaatcattagagtcttctttttgcacaattgcaattactaacttcatctaaatcaatccttaaaataactctggcattctttgctttaatgttgcaataacttgagcaactacctgatcaattggctgcgtagcatcaacagttacgaagcgttcaggatacgtctcttttaccttgagaaaaccggcataaacctttttatgaaaggcaagattctcttgttccaaacgatcttcctgacccggacgcagcttttcaattcgttttaaccctacttcaggatcaagatctaagaaaaaagtaagatcaggatctaatttatccgttgcaaaatcattaatttgcttaacttcctgaattcctaaatcacgtcccgctccttgataagctaaagaactatcgacatagcgatctgaaaatacgactttgccttcctttaaagctggacgaataatctcctccacatgctgactacgtgatgcagcatataaaagcgcttcggtcttattgtccatcttgtcgttagcaggatctaaaataatgtcgcgaattttttctgcaatttttgaaccgcctggttcacgcgtcacaagatattgtgtcttaagctctgaaccaatttggttcaatacttcttttaaaactgtacttttcccggcgccatcagggccttcaaaactaacaaaataacctctcataaaatcctccatatgtctattctacagaagtttcatagagattaacagtcctactattttttatttattcaaaataaaaaaagaccaatattcggtctttttctactgggtaatagcattagtaataccactaaatcttgtgcctcgatgacgagcttcattatacaaaaaagtatactttgcctttaagattcgattttgcacataattatcttcggataaatctaaagttgtttgatcgagatcttgctctaatgcaatttgattttgtagcttttcaatctcggctaccaacttttgatcacccattgctttgatctttgcttgctttttattagccattataatgccgttcttccttgcactgcgcgctttaaagtaatggaattagcatattcaatgtcactaccaactgacaaaccagcggccaatctggttaccttaataccagctggcttaattaatttgctgatatacatcgcagttgattcgccttctggagttgaattaagcgccaaaatcacttctttaacagcatcatttttttgcaaacgcgtaattaaagacttgatattgatctcttctggtccaattccatccattggtgaaagaacaccatgaagcacgtgataaagtccgtcatattcgcccatttcctcaaaagccatcaaatcctttggttgttcaactaccataatagttgtttgatcgcgattaggattagagcaaatatcacagacatctttttcggtaatattgccacagatcggacattgatgaatgtctttttttacttgaactaaagacttagcaaaatcatcgacatcctgatcaggcatatccatcgtataaaaagccaaccgagtcgccgttttttcaccgattccaggtagcttcatataagcatcaattaaatgagcaattggtaatggatattgcaattacatcaaacctttcgtgtatttacctaagcttgcctgagttgcctcatcaattttggtcaagcccttgttaaccgcatcaattaccaaatcttgtaacatatctgggtcgtctggatcaattgcttccttatcaatcttgatgtccttcaacttgcggtcaccagtaaaggtagctactactaaatcatcggcagacttaccagtaaattcttgagcagtaatgttttcctgctcttctgccatttgtgcttgcaacttcttagcttgcttcatcatttgttgcatgttcatgccgcccatgcccataccaccaaaattaggtcttctactcataatttttctcctttattattctattatactaataatctgcttatcaaaattgtcgtctttctctagtttaacttgtttatcatcaaaattaaactcagcagtatgcttatgcggtatcttcaccttattagttacgcccattttcatccattcatattctgaatcgatgtgccctatatcaatcatttgattattaagctgagctatcaaatcagccacaatcacttttgcagtaggacctaacatcagtaaaatcaacctattagctgcatttttaataatttcatcttcaataacttttttgcgactatatgcattagttggcggacaaatgagtctactaattgatctagcattagaaaacaagtcatgccttcgcctgagcgactatatttaccttctacaattaaaagatcatgatcctgccaaagctgtttcattttagcaaaataatctttagcgtgacttttatctactaaatcaatatatggccgtgaaaagaaagtagaaacgtatacattgtattgcaattcaacttctcttaacaagtcatgattattcgggaagaaactattttgataaaaattacggcaataatcattatagcgatctaacttttcaaaaacatcagataatcctactaataaacggcgattgctgccttctaacaggagctcttttagcgaaccagctaattccggttgataatcttgatacggaatacttgctcctctaattaaatctaattctccatctccaaaacgaatcaaagaattatgatcttctagtaagatctgtaatgttgtttctttatttaaaactttaatattataatcattgctcatagtactttagtctttaatattgactgcatccccaaaaagatcctttgccttattaatcacttctggatcaacttctggttcatctgactttttttcttgaatctcaatctgttgctttttcttagcaagtagctcatccttatggctttcaacaaattcttttctaactgccagccaatcgttatctggcaccaaaacaatgccgtaagaatgtttagcaaacttttcaatatagtctgttaagcgccctaacagatcattatctgcgctcgcattttcaaaccataaagtatatttgcatttcatgacaacttgtttaggactagcagccactggttctaatacatcaagcagtgctttttcagagacagctaaaacagattgtaaatcaggccagacattcttaattgtctctaaatcgtttcgagtagcattttcaagaacatgatatacttgtttgcgattttctgccgtagtttttttgacttttctaaccggctttttagtttgcttctcttttggtttaacagcaggcttaggagccactttaggtaccgcagtatccaagtgaaatacctgatttgttgataaacttggcttattggatacttcactaagtttttgtgttaaatcaacgacttgcttcttcagcgctgctagttcagcctgcaaatcagtattaccttgtgcaggttgagctggtgttgtcttagctggggcagcgcttgtctgcactggtgcagtactacttgcttctactaagaacacttccagtggtatctgttgctgattagtatagcgtaaatcattcaaggcattattagccaaattaatcaatcgataataactatctgtagaaacgctctttattttttcaataaagtcttttgttaaaaaagtttcctgtttattttcatcggttttgacgattaataaactcttagtagttagatcgatgatttcatctaaaatgttttttgaactagctcctttagccaactcatcttgtgtaaactgcaaggcttgacctgcatcctgatttaacaaagctaaaagaattttttcaatattttctcgatctgcaaagcctgtaatctgcaaagcatcatcatagttgacgctttccttctcgtaactcaacagttgatccaaaatgctaagagcatcccgcatcccaccatcggctacttgagcaatgactgctaaagctttatcttcatatttaatattttcttgatcaagaatgtatttcattctcttctcaaggtcttctttggaaattcgcttaaaattatagcgctgcgttctagaaataattgtcgcaggcactttttgcaattcagtcgttgctaaaataaatactacatgctctggtggctcttctaatgtcttcagcaaagcattaaaagctcccatcgacaacatatgaacttcgtcgatgatatataccttgtatttaccttccgttggagcatattttaccttatcgcgaatttcacgaatttcatcaaccccattatttgaagcggcatcaatttccatgatatctggcattgaaccttgatcagctgcaatacagttagcacactcattgcatggttcgccatcttgcaaattagtacaattcaatgccttagcaaaaatcttagcacaagatgttttaccagttccgcggggtcctgcgaaaagaaacgcatgggaaaccttaccacgtttaatcgcattttttaaggtatcggtaatcgcttcttgaccaatcacactgtcaaaagtccgcggccgccacttacgatatagcgcttgataagccataaattctctttcctaagtaaaaaagctcctagctctcgaagagctaagagctgttaatattctaacaaaaaaggcacatgcctgaacaaccttagtgctgctaccttccggtcctgacacaattcagaggtcaaacattgcccaacaactatgttaacgtatttcagtaaatattaccagcatcttgttttaaaaattactgattttatacttctttttgagctaatttagctgctttttgtttctcacgaatcgctctgaaaaaatcttttagcatttgtgcacattgatcacgatacagtccacgaattgcatgcggatgatgattaaatttttctacgctaaataaatccacaactgatccacaagctccggcttttggatcaagtgcaccgaaataaacgtcttttattctagaattaataattgcccctgcacacatcgggcatggttccaaagtcacgaataagctgcagtcaattaagcgccacatgcctaacttactgcaagcttctttaatcgcaatcatttctgcatgttgggtagcatcttcatcaagttcacgcctgttatatccagtaccaactacgcggccatcaggatcaacaacaactgcccctatcggcacctctccttgcttttcagcttcttttgcctggtcaatggctaattgcatgtatttccttttatcttcgccagacagcattttatcacttctcaattcatcgtttttatttattgtatcaaaaaagcagctatttgcgactagctgcttactttttacaatggttcaatgttacgatttctaaagttgtggtagaaaaagattcctgacaagatcaagtataatgcagcaattccagctggagcagcagtctcgttatcaccggaaatcatacctaacataaacacaccaacaattacaatcaatactgcaacaatgtatttccaagcctttttcataataattatcctcttcacatactcttgatatttacaagattattatacgaggataaatccagttttgaaagcacttttataaagtctaatgcttatttaatagtactttcaagcattttttatttagttatttcttagttgattttaagatataatagcctttatctcttgttaaaatttcacaattaccatatgtattggtcatcagcttacgcgcactaggttctccctgctttttctgaataactactaataagataccgccattaaccaaatgctcatttgctcccagtaaaatctcattaaccactttttttcctgctctaataggcggatttgttaatattagaccaaactttttatcattatccacatgttcataacaatcagaggaatagatatttacattatctatgtgattaacttgtgcattctgctttgccaagcttaatccacgctcatttacatcaaccatatctacagtttgatcaggccaaaacttagccgcaaataaaccaatcggaccataaccggtaccaacatccaagatattatccttaggaaaaacaacatctttcattgccttgatcaatacgcctgagccataatcaaccctcattttagaaaagacacctgcgtctgttgtgaatttcaaatcaatattatccacatgataatcaacaacatgttgatcatgcttggcagtaggatcagtcgcaaaatacatttgatttttttcttcactcattttaactaacctttctttttctcaaaccattcttttatcttatgcagctccgttgtattctgtacatctttcaattcattaatctgtgcttgcatctttttgttttgatcagccaaatccttgttttgcttttctaaattatcaagctttttcaaaattaattgaatattatcatgcgtttttaacgtattcgcgccattcgttctcctcatcaaatacgaagtaatcgatgacgttaacataccaactattccaattcctaaaagcatcattactaatgtaacgaattttcctacaatactatgcggtggaattgttttgccaaaaattgcatcataaccgacagtagaagctgttgaaatgacccaccaaaaagcagtatccagcgttacatgttcagtgattgcgaatgcttccgctcctaccaacaaaaatgtaattgtaaaaaagattacatagagtaggccattagtatgaaaaatattacgtaattttcccatcaaaccagctaatcgaatcaaacgcaaatgccgcaaatctgataccagcccagataaattaaaaatatttaagctgataaacaataaccccattggaataatactcagcaagtcataaatgtgagttttgaaatatagtttcttgtcttctgctgcatgtaagccacgaaaataatcaattgcaaaatatactacaattgcactattgatccagaaccatttactagtcggttcatcaatattaataaccgcagcaaaatctaaaataatcaaaaaaatcgaaataatagctaaaatggccattacccattgatatggcgttagtcttctttctatatctttcatcataaatttaattatacaaaaaaataagctcttcgcacatagcaaagagcttattcatagttgcccagttgggctgtaactatttaagggttacagtagcaccaacttcttcaagcttagccttgatgtcgttagcttcgtcttctgaaacgccttccttaacgttcttaggagcaccatcaacaaggtcctttgagtccttaaggccaagaccagtaatgtcacgaactgccttaataaccttaaccttttcttgacctgcttcagtcaattcaacgtcgaattctgacttagcagcacctgcgtctgcagcacctgcagcagcaactggagcagcagcagtaacgtcaaattcgtcttcaatagcctttacaaggtcgttcaattcaaggatggtagcacccttcaattcttcaataatcttatcagtatctaaagccatttaagtatcctccgaaaaattagaatttagatattaaatataaatttctttattattcagctgagtcttcatccttagattcagcaacagccttaacagcatatgcaaagtcgcgtacaggagcttgtaatacagaaacaagcattgaaagcaaaccttcgcggcctgggatagcagcaagttccttgatttcatccttagaagtcaacttaccttcaagcataccacccttaatttcgataacgtcaaagtcatcttcgtacttagaaacgatacgtgcaggttcagtaacgtcatcagcgttatcagtgtagataacagcagttggtccaacaaaagtatcatcaagaccttcgataccagccttagcagcagcacgtcttaagtaggtgttcttgataaccttcatcttaacatcgttatcacgaagttccttacgcatgttagtaacttcttcaacagtcaaaccaaggtagttaattaccaagattgccttagcagctttaagttcttcagcaaatgcatcaacgaacttttctttttcagcaatagcagctttactcaaattatttcacctccatgatcacattgataaattctataaggccttaaaaaagcaaaaactccatgccgaaagacatggagcataaaaatcttcatcatcttctggcctcggcgggattttgaggcgtcatgccacccgagtcttaggtagaatttacagttaattattatagcaagctttgctgtaaaatgcaaaagataattttatttattttggttattgatgatttcattaattttatccaccatctcgtcaacttgatcattgccaaaaacagtgtagtttgagtaagtattgttttgatctgctatatccccaaaagacaaaattggaatattacgttccttaacttgatcaattatctgataaactttatcaccgtagttaatgtccaaataagcatctactgtcttgattaagcgtttctgtttttcaccaataattgtttggtataacgccaatacagtttttgaaatattcattaattatacgcgtggtgctagttaaatcgttttagttaataaaagttgtaggtaatttaaatagaaaagagtctgatctaattgaactatctcaagcttaagcgtttttctcaccatttacaagttagttttaatcggttaaatgtgatttgtcgctcgctatataagctttatgcgcctgatggacttaaacatcgtaaaaatgttgatcagaccaagcttcctgatagttctatcttagcgatgctcatttggcaaactgaaattggaattgaatctcaacgaagattctgtaaattcttcgttggcttatctcattctcgttttaaccgtcgagctcgaatgctcttgcctctaattcgttgtatccgtcaggcttggaatcaagaagtaaagacagctggagaatttttgattattgatagtttcccagtgccagtttgccagcctgtttgcaattatcgtgtcaagatctttcggggcgtagctgatattggttataaagcaaccaagaaagtctattattatggcttcaaggtccacgcaatagtaagcgatgatggcaattagaaaaagcattgaaagcgacttttctttgcttagttattacaacgctgagaataatcgagcaagaagtccagtaggctttcaacagcggctagaaatagctattttagcttataatatggcatattgtctagaacgatttaactagcaccacgcgtatcaactgttttttattacaaaaaaagcaccgctttttacggtactttatttaaatcgtttcactttcagttgaattagatagttcttctagttcacccgtagttttataaaccacccagctagccaagttaacaatgtggtcaccgattcgttcaagtaaacgggtaactacaaaatagcttgatgaagccattgcacgcgaaggatcatcttcaattccatcaacgatcaattgacgagctcttacatagtcgtggtcaatcatgctatcacgactagccacttcacgtgccattttttcatcatcttgcacgtaagcagttaaaacttgaattaacatatgtcgcacattatgtgtcatattagaaataatttcttcaacttctggaatacgaggattaccttttactctgattgtttccagagcaatactcatagcattttcaccaattcgctccaagtcagtagtggcctttaaaatactgataacaactctaaaatcagtagctaccggttgctgcaaggccattaattttaaggcttgcttttgaatattaattgattctgtaggaatcttttcttcatcatcaaccattgactgcgcagtctttttatcatgatcaacaaaagcacgggtagcatggtcaatatcatcgttgacgaggacacccatttccataaattgtgtatttaattttttcagttcatccaaaaatatttcgtgcatctttttacctcaaaattttaaccaaaacgaccgttaagataatcacttgtgatttgtttcttaggtgcaataaacatttcttcagttggaccagcttcaatcaaatcgccattcatcaaaaaggcggtctgatcagaaattcgtcctgcttgctgcaaattgtgagtcaccataataaaagtatactgatgctttagttccatcagtgtctcttcaatctcactacttgaaattgggtcaagcgcacttgtgggctcatctaataaaacaactttaggtctaacagccaacgcacgagcaatacaaattctttgctgctgtcctcctgaaaatgcttgagcgtttctagttaaattgtcctttgtttctttccaaatagcagcttgcttaagactctcttctacccgctgatcaattagctctttgtctttaacaccagcaatttttaagccataagccacattgtcatatacggaaaacgggaatggggttggctgttgaaaaaccatgccgacttctttacgtagactgaccaaatccattttagaattatagatatcttggccttcaaacttgatttcacctgtgatattaatgttttcgatgtcatcgttcattcgattaagacagcgtaaaaaagtagatttaccacaaccacttggaccgatcaaagctgttaattcttttttcttaaaatcaagactgatcccgtgcagtgcttcataattgccataacttagatgtacatcttttgctgaaattattgttgtcattttatccaaaacttccctgaatatagttttcagtaatcttacccttaggattagtaaagatctctgccgttgaattatattcaattgcatgtcctaaatggaagaatgcagtataatcactaattcttgaggcttgctgcatgttgtgagttaccataatcatagtatacttactcctcaactgcttaagggtatcttccagtttagaagtagaaacaggatccaaagcgctggcaggttcgtccagtagtaaaatttctggcttaacagctaaagcacgagcaatgcataaacgctgttgttgaccacccgacaatgctaatgcacttttatccagcttatctttaacttcatcccataaagcagccgcacgcaaactttcttctacaactcgatcaagttctgcccgatccttatgtccatctgccttcaaagcataaacaatattttctctaattgatttaggaaatggattaggccgctgaaaaaccatgccaatgttttttcttaattcataaacattgatattaggcttattcacatctaaaccatgaaaccagatttttccgttaacagttgctactcgatcattcattcgatttaatgaacgtaaaaatgttgatttacctgaacccgaagcaccgatcaaagctgtaatcgtgttctttttaaattgaagactggcatcaaataatttttgtaccttaccgccataaagaacacttaaatcttcagttgataattccaaatcatcatttgcaaaagttttaatatagctaggttttaaatcttgcattatttcacctacttagctgcagttaacttgcggtacaatttattgcctaaataacgtgcacctaaattaaatacgattaccacaataaccaagagcgctgaagtagctgctgaaacaatcgtggcatcaggaataattccttcagtatttactttccaaatgtggaccgccaatgtttcggctggccgcattacattaagtggactagttggactaaatggattccagtccgcataattgactgttgatccactttgtcccgctgtatagatcaaagcggcagcttccccgaagattcggcccgcactcaaaataattccagttaaaattccgggaagagcagcgggtaaaacaatcccgcgaatagttttccaattagataatcctaaagccaatcctgcttcacgttgatcttgtgggacgcccttgattgcttcttcaatattgctagttaaaattggcaaattaaaaaaggtcaaagctaaagcaccagaaataattgaaaaaccaaagccaaattgaactacaaacaataaataacccaataagccaactacaattgatggtaatgaactaagaatttgaattgtagttctaatcaaattggtcacccaattatctttagcatattctgctagataaattgctgctcctaaagcaattggtaaggagataatagtagtcaaaattaacaaataaattgaattgaaaagttgatcacgtaccccaccaccagcttggtatgatgaggcttcagaactcaaaaagcgccaggacaaatgtggaatacctgtaatcaagatatcacctaggataccggccaaaattaatacaacaattcctaccaaaatatagataatcgccgtagctaatttatctttcttttttgcatccatattacttttgtcccttctttccaattaacttaactaggaaattaaataccaaagacataattaaaagcaataatgctaatgaccataatgcattgtttggcaaagttcccatgaccgtatttcccatttgactagttaattggctagttaatgttgctgatggactgaccaaattgtatggcatcaagacggcattaccgataaccatttgtacggctaaagcttcaccgaaggcccttgccattccgaagattaccgccgtcaaaattctaggcgtagcaactcgcaaaacaacatgataaatagtctgccaatgcgtagaacctaaggccattgaagcttttctaaaatgacttggtacagcctttaagctatcaaccgttaatgatgtgattgttggtaaaaccataacgaacaacaccaacgtagctgctaaaataccaaaacctgttccaccaaatagttttctaatcacaggcacgatgatagttaatcccaagaaaccataaactacagacggaattccaactaataattcagtcactgactgtaagaaattggcaccctttttagatgaatattcagtcatataaagagctattgcaattgcaaacggggtggctaccaatgctgctaaaagagttactaagaacgaagtaacgatcattaccgcagcaccaacatgattcttgccctcacccgggtcccaatcagttgaagtcaaaaagtgaatgacattaacatgatcgctgacaaaagtagccaagccgtgatagccgacaaagccgataattgagacaactaagacaataatcaaaacaattgccaagtaagttaaacccttgccccaatattcttgatgagtctctttagatggcttggttaatttatcaatatcaacactagtcggacccatcttttttaatttaacgtgtggaacgtgttgactagcaattgcttgatcaacaacttcctttaatttatccttcttatccatgaactattttcctatttgtgtaacttgattcttgctattacgagttactttcatttcattgatactgaggtacccaatcttaggtacaagatctttttgtactttttcacctaacatataattaataaacgctttagtttgtttgttgggcttacccttagtgtacatgtgctcataacaccaaatattccacttattagtagtaatatttttgttagttggctttaccccattaatactcaacttttgaatattggtatcatgagcataaggaaaggacaagtaactaatcgtaccaggcgttgaattaacaatctttttaacggcaccgttagagtcctgttcttgcgacttaactggttttgttccttgtaaaattatatcttcgaaagcagatctagtaccacttcccttagaacgattgatcacagttatggcttcatttttgccacctagttgcttccaattcgttaatttaccagtgaagatctgtttcaattgcttttgcgaaacatttttcacacctacacccttattaacaattggaacaataccaactactgcaattttataatcacgaagtttcttggcatcaattcccttttgtgtttcggcaaaaacatcagaggttccaatctggactgcaccagcttgaacctggctcaatcctgtacctgatcctccaccctgcacgacaatgttgctgtcttgatgacttaagcgataatcattacctgcttgttctgctaaaagctgcattgcacttgaaccaacaatagtgattttagaaccattattagcacagcccgtaacaaaagctagcattagcaccaacataatgactagttttccaatagaatgctttttcatgacattatccttaatatatagatttgtaagttcaatttatgataccatgttcgaaaataataggtcaatgaatagaaaaaagcctcgcaatagcgaggcttttaatagtctattttaaattagtccaagtttaatggatcaagcttgatccctgggccaaaggttgctgaaacagcaacactcttaatgtattgacccttagctgaagctggacgagcacgtaagataacgtcgcgtaatgcgtcaaagttttcaactaattggtcttcagtgaatgataccttaccaataggagtgtgaatagctgcttggcggtcaacacggtattcaacttgaccagccttaacattcttaacagccttttcgatatccatggtaacagtaccagtcttagggttaggcattaagcccttaggtccaagaatacgacctaaacgacctaccttagccatcatcattggagtagctactacaacgtcaaagtctaaccagccgccttggatcttttctaccaagtcatctgagccaacaaagtcagcacctgcagccttagcttgatcagcttgtgggccttcagcaaatactacaacggtttgggtcttaccggtaccatttggtaaaacgatagaaccacgaatttgttggtcagcttgcttaggatctacgcttaagttgtaagctacatcaacagtagcatcaaagtttgcgtatgaagtttccttaacaagtttcatagcttctgctactgagtataatttatttgagtctaccttcttggcagcatctaaatatttcttaccatgctttggcatgtgatttcctccttgtatatgtggtcaaacgagcttctcttaactctcccacctaatttgttacctaaataacaggattagtcttcgacttcgatacccatacttctagcggtaccttcaaccatgcgcatagcagcttcaatatcagcagcgttaaggtctttcatcttagtctcggcaatttccttaacttggtccttggttaccttaccaaccttcttggtattaggttcaccagaagccttttggatcttagcagcttgctttaaaagaactggtgctggtggagtcttagtaatgaattcgaatgaacgatcttcatatacagtaataactacagggataatcatgcccttttggtcagcggttctagcattgaagtccttagtaaaaccaacaatgttaataccagcttgacccaatgcaggaccaactggaggtgctggggtagcagcgccagctgggatttgtaacttaactacgttaataactttctttgccacggtcaaaacctccttgattccgtgatgcggttaaaatggagaattttccttttttctcctcccacaataataaacgtaccgtattagaataacatcgtttgggtacaattacaactaaaaattctaaatattattcgttttcgtcaagcttcttaacttgatcataatcaagttcagcagtagtcgcacgaccaaacatgtcaactgatacgtataatttgtacttatctggttgaatatcagtaatcttacctaccatgccattaaatgcaccttcagtaatagttactgattcgccaatatcaaagttaactactggtttcttagcaggttgaccttgattcttaagcaaacgcgttacttcttcatcaagaagtggtgatggcttagagccaccaccgtgtgagccaacgaacccagttacattaggtgtgtttctaacgatgaaccaactttcatcagtcattaccatttcaactaaaacatatcctgggaaaatcttttcttcaatttcttgtttcttgccgcgaacggtttctactttttcttcttctggaaccattacacggaaaatgtagtcttgcatccccatgctttgtgcacgtgacaacaagtctgacttaaccttgtcttcatagcctgaataagtatgcaaaacgtaccatttcttttgtgttgtttcgaccatatttttctccttaaattttaggtaaacaaaaaaacctcccacagaggttttcttttagctgtcaatattatagcatgaatcgctgataatttctaattatgctagcaattacattaatctttgagtcaaccaagtgaagagccagtcaagtgcacctaaatatgccgcaaataaaattgaactagtaataacagttgctgtatcacgtctattttgctttgcggatggccatttaaccaatttcatttcatgaccaacactcttaaaaaacttaatcattagctttatttacctcgtttccttatgcaatgttttcttaccgcaatgtttgcaaaacttttgaagttcaagtcgctgagtgcgattcttacttgcggtgattgagtagttgcgtgacccacaaacactgcaggctaaggctgcttttttcactgccataatctcacttccaaacttttataaaaacacatacttactcagtattttatactgttgtcccttcctacgtcaataatctgatttacattactaaaagtaatcgagctcaattacaactaaatatttttattttgatttttgcttatctataataagtgtaactacttgttagaaaggacataataataaataaacatcctgaatatctattgaataaaatttctggtcctgctgatttaaaaaaattatctcttccagaaatggaaaagttagccagtgaaattaggactctaatcttagaaaaagatgccgctgaaggtggtcacctaggtcccgacttaggaatcgttgaagctacaattgcttatcactatgtttttgatgcaccaaaggacaagattgtctgggatgtttcccaccaaacttacccgcacaaaatgttaactggacgtgcactcgcttggcttgatccagaccactatgaagatgtaactccatatagcaaccctgatgaaagcccatatgactattacgccgtcggtcacacatctacctcaattgccttagcaactgggatggctaaagcacgcgatttaatgggcaaacatgaaaacatcatggccttaattggtgatggttcaatgaccggtggccttgcttatgaagggctaaacaacgctgcaattgaaaagcataacttagttgtagtggtaaacgacaatcaaatgtcaattgatgataacgtcggtggcttagttactgctttaaagaaactacgtgattctaatggtgaaaccaaagaaaatccatttactgcaataggctttgattaccgttatgtcgcagatggtaatgatatccaatcaatgatcgatgcttttaaagcagttaaaaatgttgatcaccctattttgcttcatatcaacactctcaagggcaaaggttatcaacctgcaatcgacaacgaagaagcacaccactgggtaatgccattcgatttaaagactgacaagacgacagtagcaatgcctgaaggtccgaccgctagctctattgcactcgatgttcttgaagatcacatcaataatggtgagaagatcatggctatcaatgccgcaattcccggcgttttcggcttagacagaattaaaaacaaatatcctgaaaactaccatgatgtaggaattgctgaacaagaatccgttgccttcgctgccggaatggctaaggaaggtgcaactccagttttatttgaaaattcaaccttcttgcaacgtgcatttgatcaattatcacacgatgttgccgctaatgatttaccagttgtaatgatggttgctggtggtggcatttctggcacaagtaagactcacctaggtgtgtttgatcaagtaatgatttctaacttgcctaactggatctaccttgctccaactaacttagccgaagaaaaggcaatgatggaatgggctattaagcaaaagaagcatcctgtagcaattaagatgcctaccaaagatgttcctgaaggtaaagaaattactgctgttgactattcagaaatcaagtacgacattaaaccaggtaaagatgttgctgttttagcgttaggtgatatgtacgatatgctaggtaaaaaggtggctgaaaagacaggtgctagcttagtaaatccagtttctgctaatattttagacactgccgctttagacaaattgactcaagaaaacaaagttattgttactattgaagacaatattttggacggcggttttggtgaaaaagtagcttcctaccttggcgacaaggatattaaagtactcaactacggccaaaaacgtgtctatactgatcaagtacctttgaaagaaattttgaaagacaatcgtatgacagttgatcagattgttgaagatattgaaaatgcttaatagttaatcaatctatgaaaaaaagacgcaatgcgtcttttttgttttactcaaatttctgtggatgcttatcttgaaactgagccaaatcttcataagaggcttcaagttcatgctcaatttttcgataaacgagaatcaattcttgataaatcgctacattttggggatttggaaaataaacttggctttcggcagtacgctttttaatcttttccaggtctggcttatcttctaatgcagttttagctaaaaacatagctgctagggtaccacactgctcatttttaattacaatcactggtaagttaaaaatgtccgcgattaattgtctaacaaaatcactttgcacaaagccaccagtaacacgtaaagcttgaggctgtcccacttgatcaagcaatccttgagaggcgccaagcaagttaaaaacaattccctccaaaacacttctagccatctgcggtttagtgtgatttcgcgtcaagccaacaaaagatccacgtgcttgagcattccaaattggagctcgttcaccaccaagataaggatgaaacaacaatccattacttccagccggagcagtttgtgccacatttaagacgtcctctgccgtttcatctgggccaaaaattgtttttctggcccaatcgaacacaattccaccattatttacagggccgccaagcaaataatgtttggcgtcaacagggtaacagaaaaagcgattcttttgatcaacaattgccttcggtgcaattactctaaccgcaccagaagtgccaacattcaatgcaaaatctttctcatccaaaacgccgacaccaatcgttgacaaatacccatcgcttgcgcccaaaacgatttgagtttcatcatttaaacccaatttagcacgatattctggaataattttacccacagtagattgttgatcagcaattgtcggcaattgaacttgatctagcccaatctgagccaatatcttttcatcccaggtcagcgtttttaaattcatcattccactgccagcagccatagttgtatcagttaatatttttccagttaagccccaaataatatattctttgatactaatccatttttttacttgtgcaaaaagtgttggctgttcttctttaagccacagcaatttatacactggcgccatcggatgtggcggcatccccgtttgctgataaatcattcttgcccagcccgacttttttgcccgctgcactacatcactactacgattatctgcccaagtaatgctgtttgtcagtaactcattattttcacctaagccaattaagctgtgcatctgactagaccaagaaattgccaaaatttgaccagatgctttctgacttaattgataaatcattttctgtaccgcgtcaaaaataagctgtggatcttcttcagcctgtcccgcttcttcctgaatcaatggataggaaattgccaatttagctacttcacttccatcttcgccatacaacacacctttagtcgcagtagttcctatgtctatgccaattatatatttcatctttaaaattctttcttaattttagtataaaaaaacagccaccggagaaggtagctgtcttagtggtcaaaactatgcgtgaccacggtgcgtagaacattgttttttagtcggatttacttcttaagattttcgttaacgaaggcttcgattttatcgtctgagtctttcaaaaatggaagcatatcttcttccgtcttcatggtatctctaccattcttttccataaagtagtcccaaagggcatctctaactggcatatctgaatcactccagtcaaaagcttccttcatgtgacggtctaacaatgcagtcttaataatttcgtctgccatcttaaattacctcctaaaatattctacattacttattataccgcactttcttttgatcagctatcaaaaaagcactttccgcattttctgtaaagttcgtgctcgagctctgaccagcttcattgcttcaatatttagatgatcaatcgcatactctgtacttatctcgccaattatggttaataatgcaattaattcaacgtgtgacaagctattaacaaaattattgtaagtctcatcaactggaatcgataattcagagcggcatggttcattcacgcttccttgaatgtccgccttttctagcggaatcgattgactatagatttgcctgcgacgtgccatattgtaacgtaccaaggtccgtgcatgattaaacaatttagttttatataaactgctaaatttcccctttttaggcgagaaaactagtgctgcttcataacaaacaatcattgcctcttgatcccagtctttacgatcataatgatgcaaatagaattgcttcacgattgaatttactaacggctcatataaatgaaacaatttttctaaagcttggtcatctcctgcccgtactttcttaatcagcttctcttcattaatcattcaatttatcctccacctcaaagaatacagactatcccctgagtttgagaagaaaacacatgtttaatggacagaaatgagctttatgtatctaaaaaagtagacaaaactcacacttttgtctactttctgtttattttactaatggatttctactgttataagcttgataaagcaataccccggttgccacactagcatttaaggattgtacgtgaccaaccattggcaaagtaatagtttgatccatctgctttttaagtaatggggcgatgcctttaccttcgttaccaattacgagtacagtcttgccttgggcattccattcacgataatcagtacctgccatatcagttccaaagacccagtaaccgcgtttcttcagttctttagtagtttgaactaaattattaacgcgcgctactggcacataatcaattgctcctgtagatgttttagctactaccgaagttaagccagtcgcgtgacgcttaggaataatgatcccgtcaacgccagtagcatcggctgaacgcaaaattgatcccagattgtgagggtcttcaatagaatccaacattaataaaaatggttctttaccttccgcatcatacttgtccagcaattgatttaaatctgcatattcaaagctagaaattgctaaaactagaccttgatgattgccaccagcaaccaaacgatcaagcttatttttaggcacgtcttgaacaactaaacgcttttttttagctaaactataaacttgattagcaaattcttcttgtacaccgtgttgtaaaaaaaccttattaatcttgtcggcactttgtgtttttaaataatcaagtccagcatggcgtccaaagacaaaatctttatttgaagtcataatttttcagcccgtcctcttctacagtatcaatacaccacttgcttaagtctgccactcgatcatttttccccagtaaatcaagataaccaatcattgcttcaaagcctgttgataattggtatgttttcaaactagtattcttagccttagtatgacttttagcattacgtccacgacgaaaagcagctaattcatcatccgttaacatttcttcatcttgcatcttagttaccaacgcagcttgtgctttagctgaaacatagtgagtcgcttcacgctgcaatacttgtggtttaacgataccgcctttaactaggtgtctgcgaataattaattcatacactgcatcccctaaataggctaaagtttgtccatttaaagtatccggattaacatcctcttccgttagtttttttattttagtcacgagtccacctagttccttgtggggtatcttgaatagtgatccccatttcctttaattgatcacgaatttgatcactagttgcccaatctttatttgctcgagcctcatcacgctttttaactaaagcgtcaatttcatcgtcattggagccagcatttttaacgcaaagcttattagtatccacgccaaacactaataaccaactagctaatttctctttaaacttttgcaattcttgcttgtcagctctagcagcattagcgttggcattaactacaggcaacaaatcatagatagctgttaaagcattttggacattaaagtcatcgtccatcgcctgttcaaatttttcgttagttgccataatcgcctgtgctaattcggctgattcttcactagctgtatcatcttctagacggtaattaatattagtcaaagtatttttaaagcgatctaaaattgtagctgcttgtgctaaattttcagcagaatagttaatttggcggcgatattgtacgctagccatgaagaagcgcagtacttgcggatcaacttcccttaaaatatcgtgcactgttacgaaattgtgcagtgatttagacatcttttcctgatctttaccgacagttacaaaaccgttatgcagccaataattaacaaactttttcccggtcttagcttcactttgtgcaatttcattctcatggtgcggaaattcaaggtcttgaccaccaccatgaatatcgatcgtatcgcctaaatatttggtactcatgacagaacattcaatatgccagcctggccgtcccttgccccatggtgaatcccaagcaatttcatcgggttccttttgcgccttccacaaagcaaaatcgattggatcttctttgcggctttgttctgtatcgttaatgtgctctgaagcaccctcttcaagctgttcaatattttgatcacttaactgaccgtaatgcttaaactttttggcacgataataaacatcgccgtctacttcataagcatagccattgtcaattaggcttttaacaaaagtgataatgtcattaatttcatgagttgcacggggatgcaaagtcgccggctcaatgtttagcgctgtcgtatcagccaaaaaagcattgataaaattttcagccaatttgggtacagtcgttttttcagctctcgcttcgttgatcatcttgtcatcaacatcagtaaagttagaaacatacttaacgtcataacccttatattcaaaatagcgtctaatggtgtcaaaagcaattgcgcttctggcattaccaatgtgaatatagttatacaccgttggtccacagacatacatgctgatatgtcctggaactaatggcttaaattcttcttttttacgcgtcagtgtattataaactctcacggctaacacttgtcccttctgtcaaaataactaatttttattttagcagatgaaaaaagaagctgcatttatttgcagcctctttttcaatttatctaattaaagattattagcactcatttgcttcaaggttaaatcaatgtgttctaatacacgttctttacctaaaagctccattgcttcgccaataccaggtccaaccattgaacgcgtggtagcaattctaattggcataaagagctttcttcccttgatgccagtagccttacgagttgcttgaatagcgttcatgatttgaactgaagtaaatcttgggatgaggtctaattgcttcttgaattcttcaattacaccacggccatcatcattcttgatttcttcgatttcttcgtctgaaagatccttagcttcttcaaagaaaatcttagccatgtctacaatttgcttagtgtatgacatttgtactgagtagatgttaaccaattgacgaacccattccatcttttctggtgttggatgctcatcaacaagacttgcttcttgcaagttgttcaaagctaaatcaagcaaagtgtcgcgatcagccttcttgatgtattggttgttaatccattcaagtttcttttggtcaaaagcagcaggtgacttagacaaacgtgcagggtcaaattgcttgatgaattcacgcttgttaaagatttcgttttcaccctttggtgaccaaccaagaagagtaatgaagttaaacatagcttctggtaagtaaccaagatcacgatattgttcaataaattgaagaactgattcgtcacgcttagaaagttttttaccagtttctgaattaatgatcaatgtcatatgaccaaacttaggaggttcccaaccaagtgcctcataaacaactaattgcttaggtgtgttagaaacgtgatcatcaccacgaagtacgtgagtgatcttcatcaagtggtcatcgataactacggcaaagttgtaagttggcattccgtcacgcttttgaataacgaaatccccaccaatagtgtctgattcaaactcaaggtgtcccttaacaatatcatcccatgaataagtttccatttctggaatgtggatacgaacaactggctttaagcccttagcctttgcttcatcttgagcttgcttaatttcatcagcagtcataccctcatattcgtaagtatagtgaggtgcaacacctgcagcacgttgttcttcacgttgtgcttcaagttcttcctcagtcttgtatgagtaatatgctttaccttcatcgatcaattgatcaatatacttttggtaaatttcttttctttctgattgacgataaggaccatagtcgccacccttatcaggaccttcatcccagtcaattcctaaccagtgaaggttttccatttgagacttagaaccgcccttaacattacgcttttggtcggtgtcttcaattctcaagaccatcgtacccttgttatgacgagcgaataaatagttaaaaagtgcagtacgtgcgttaccaatgtgcaagtgaccagttggacttggtgcatatcttacacggattttttctttagccaaaattcatgcctctttcaaaaaatagtaaattcaaacaatcttagtttactcgttatatagtaagaattcaattaatgctagccaaaaactaattttaaagcttggggaatactcgaaacgggaattacctcaatgccatgatcttttaatccagaatacatattatgccgtggaataaagatccgcttaaaccctactttagccgcttcttttactcgtgcatcgattttatcaactcggcgaacttcaccagttaagcccacttcgcctacaaaacaatctgtcggcgaaatttctttatcggtataactggatgcaactgccatggcaattgctaaatcaattgctggttcattcaatttaatcccaccagttgcagtcaaatagacatcttgattctgcaacattaagtttccccgcttttcaagcaccgctagcagcaatgaagctttgttaaaactaatacctgacgtggtccttttagcatagccaaaagctgtcggagtaaccaaagcctgaatttctgctaaaagtggcctagttccttcaagcgataccaccacagcagagccagtagaattaggtaatctttggtccagaaaaattgatgatggattagttacctctcttaagccttcattaaccatttcaaacattccaatttcgtttgctgctccaaaacggtttttaacagaatgcaaaattcggtaagaatggtgttcatccccttcaaaatagagaacggtatccaccatatgttccaagatcttaggcccagcaatcgcaccctcttttgtaacgtggccgataacaaaaactgtaatggcatccatcttggcaattttcattaattcacttgttacttcacgaacctgtgaggcagagccagtcatcgaatcaagacttggttcattcatagtttgaatggagtcgattacaacaaagtcaggcttaacatcattgatttgttcgcgaatatcatgcatgtcagtctctggatataagagcatattactttgacctacacccagtcggtcagcccgcaatttgatttggttagctgattcttctcccgaaacgtaaagcaccttatatttttcagataagtcactcataatttgtaacatcaaggttgacttaccaattccgggatctccaccaattaaaactagtgagcctggcacaataccaccacctaaaacgcggtttaattcctcagatttagtgacaattcgttcttctttttcagctttaatcttatccagctttaccggttcatttaatccagtcttctgaatcaaacgactagcagttgccttagtagaacgcttttgcacttcttcagtttctttttcaaattgattccaagcaccacagttagggcagcggcctaaatagcttgccgaaatatagccgcaagaacgacacttatattgtgtttttactctagccattaatcacccttcttttcattagttgatccaaagccgctaactctttttcgactaattggatcatcatcgtcggtcttcaagtatttgataaaaatgccttgagcaatacggtctcccttcttgatgtgcaagggccgtacgccataattaatcatttgtacaaaaatttcgccctcattgttaggattattgtaataatctgcatcgataacgccgatcccatttggcaaagctagattacgcttaaaagtattagatgaacgattagctaaaatcaacacttcatcttctggcatataagctttaagtccagttggcactaacaacggctttaaaatctgatccgccatctcatagtcgcgctcatacagctggtgtccatttctaatcaacctaaaaattcgcacaaaatttagtcgccaaatgctagggatagtaatgtcttcagccgcttcgatgtcatagcctgcactagctagggtctgtctgcgaggaagattaatttcctgatcttgatactttttgactacttcaaatccacgtgttttcattccaaagctccatttatcttttattttgacagttatctattttacaatgtttttagtcaacacaaaataaatagctctctattatttattacgcaaaaaaatgagattatttttttaaaaaggaattttttatgaataagcaagatgcgcaccaaattttcactataaaaaatgaagaagacatactattatctagcgttaccttagataaaatcgctcgcaaagacagtaatgtctggataatgaaccatttttttattaatccacaatttaatagtaaggatttgcttgaaaaacaaatgcaaaaagtttggcaattagctcaagaaactaacttacccatttggccgcttgatcctatgatcattgactacttcacccagcatcctcaatttcacaaaatttggtatcatcgtccatttaatcgataagattattagacgactcattttgaataagataaaattaatttaagtacttataaaggaggattttttttatggtaaaagaaatcaacaatgatactattaataaatttgaacaagacttagctaaccaccctgtttttgatgtggctagtcacgctgctcaagaaaacggtatctacaaagctagtcaaaacttacaaactaagatcgacctagatccaaccttctcaatcgaaattgatacaggtaaccctgccgatcaaaagcagtctggtcgctgctggatgttcagtgctttaaacactatgcgtcacccattacaaaagaaatttaagttaaaggacttcgaattatctcaaaattacactaacttctgggataaatttgaaaagtctaactggttctttgaaaatgtgatcgcaactgctgataaggacttgggcgatcgtaaagtttcattcttatttgcgactcctcaacaagacggcggtcaatgggacatgctttgcggtattattgaaaaatatggtatcgttcctaagagtgtttatccagaaactgctaatgctactaattcaagtgcattaaacgacactttaaatactttgcttcgtaaagatggtcttgagttacgtaaattagttcaagatggcaagtcagaagatgaagtacaagctcgcaaggaagaaatgctaaacgatgtcttccgtattttggctacttcattgggtgttccaccaaagaagttcaacttcgaataccgcgatgatgacaagaattaccatattgacagggacattaccccaaaggaattctttgacaagtacgttggcatggatttagcaaaccatatctcaactatcaatgctccaactaacgacaaacctttccacaaggtattctcagttgaatacttaggtaacgttgaaggcggtcgccaagttcgccacttaaaccttaaagttgatgaaatgaaggacttaatcattaaacaattgaagagtggcgaagttgtttggttcggttcaaacgtagttaaggattctgaacgccgtgctggacttcttgatactaacctttaccgccgtgatcaattatttgatgctgacttcactatgtctaaagccgacatgcttgattctggtgaaagcatgatggaccatgccatggtgattaccggtgttgatatcgttgacggtaagccaactaaatggaagatcgaaaactcatggggtgaaaaacctggctttaagggttacttcgtaatgagtgattcttggtttaattcatttgtttaccaagcagttatcaacaagaaattcttaccagaagatcttaagaaggcttacgatgaaggcaaagataacccaattcaattattgccatgggatccaatgggtgccttagcatttaagtattaatagctataatcaaatagttaagtgtcggaaagaaatttctgacactttttttacaacttcaagtgtcctttcttgtatcccaaaaatattaggcctacaacgaaggcgaattcggtagagaggattcaaatggtaaagtttacgtaggatgaaaaaagcatgacagactattcaaaaagacaattaaaagcattagatagaatttcaaagaaaattagtgatgctgaaagccacttcgctagaattgaagattcagtacctgatcgtcgtcaccgtactgcacaacatgaaacgattaaggatattaaatctattttgaaacatgctagaaaagtcggcgaatacgatgctaagattgatgccaaagctgatgaaaatgagtatgtttacgttgaagatgaagaaggcgtcattaaggatcttgaaaaagaattcaaagaccttgatgatagacttagcaagttaaccgatgttgatggctatgacatcaagcgttatcgtgaagaacaccattcacttgaaaaggctaaagaagttttagctaaggccggcaaattgaagtaaaacaaaatataagtaaattacacaaaagacgtagttagataaaatgttctaactacgtcttttttaccaaatatgtaataagcgggttggatctaacttacttaagttgaactgatgcacatgttgctttttattttccggaaattctttcacaaaatccgctacattatacaaaccagttgaatatgtccaaactcccttaacctttctgatcggatccaacatctcatttcgaattggataagctgaaatcaaaaagtgcttgtgatgaaacttaaagacaaaatatggcaacttgaactgcttaactgcttcatcttcagttttagcaattgaaactacatttcgataagttccatacttttctgtaaacttgtcattaaatgaaaaataaaagttcgagatatgcacatgtggaaaatcttcttcatctaccatgtcaggaaccgcaatcacatgagcataacgatctaaatttgtctcacgctgtgacaacgcatgatccatctgatttggcacaactttatgtgcccagtatggtacttctggatgtgcttcataagaacgatacatttgcttaaccacttcaggcttaacccaatcgtaatgcattctagtctgattacgcttaagcaaactctctaaggtagtatgttgcatcagatctactacaaagcattcatagtgatacttgtctacccaaggcttaaaatgttcaatcgcacttggaacgatatgcgtcccatccacaataacagtttccccatattccatcttgtgttctacaaggtgatccaccatttgctcagtacgcacagttacgtgccgcggaatgacttggtgtaaaacatccgcatcctcttgatagtaaactgtcaaatccgccaatagtagcctaatttgatcacgactgatcgcataaggatttaagtgatggcgagtaataaaagaagatttaccggagccaggtgcacctcgtaataaaaataatttacgcatgcctaatactccaaactaaatatactagaaatcataatagattttaccatagatatgtgtaaaacctcatttagagcattaaaaaaatgcactaaggtgcatttttaacattatttacgtaaaatttgtttgttaataatctttaagtgatcatccatagtataaacaatcggttccgcattaggaacttccagttttacgatgtcatgatcattaatctgctctagcttttttatcaaagcacgcaaacttgaaccgtgggctacgatcagttggtcttcaccattcatcaatcgagatgcgatatgatcataataatatggcatgagtcttttctgagtttgatgtaaactttctgcccgtggcatcaaatgctgatcaaaatgcttataacggcgatcaatcattggcgacccctgcttaggtggaactgaatcaaaactacgtcgccacaatagaacttgttccacaccaaatactttacgtgaaatgtccttattaaggccccttaaagcgccgtagtggcgttcattcagccgccaggtcttagtcatcggtagccataataaattgcagacatcggctactatatttgctgtcacaattgcacgggataagactgaagtatgaatgtgggtgggagcaaaatccgaaatggttttaatcaattcaccagctttttctgcttgttcttcaccttttttagtcaacggaacatcgttccagccagtataaacattggcagcatttgccacactttcgccatgtcgaactaatactaatttagccattctaagattccttacttcattaatactctaacgatcataacaattcctgcgatcgtgaagataattcctaaagccataaaggctctaatgccgcctttattggtaggttgcttacgcctattaaaagcataggacatgtcataaatacccataatcaatacaataatcgctgtaaaaatattaacattaaacattctttcacctaatcttcgttaataccgtggcctggaacgatcatcttgtcttttctgccacgctcgcactctgcttgtaaggtaatatgattaatacctaactctttttgtaactcctgtccaatatcttggtatagctgctctaattcatcggctcttaatcctggggctacattaatatgcgcgtccatcataataaagtcatcgctgtagcgccaaacatggacatgatggatattttgaactatggggaacgataaaacaatcttgttcacttcattcaagtcgatatcaggattagattccatcaaaacattggctgctttcattgtattttcataagcttcatgcaaaacaaagattgaaactaaaatagtcaaaactgggtcaagccaagttacattccagaagtaaatgaagatcgcaccaattacaaccgctacactggacaaggcatcacttaacatatgaataaaagttgaccgtacattcaaattagccttggaatcgctatgcattgctagcattgaaataatattggcagccagcccaataatcgagacaatcagcataatgccaccgtgaatatgttccggcttccagaaacgttgaattgcttcaacaaacaaaaccacactgatcacgatcaagataacgccattagtaaaagcggctaaagtttcagctctttcataaccaaaggtcttaaactgattacgacttttgcgactaatcaggtgcgccacaaaagataaaataattgcaccaacatcactcagattatgaaatgcatctgaaagcagtgctaatgaacctgaaaaaataccacctataaattcagcaatagtaataacaacattcagtagagttacgaagacataacgcttagttgtatgatctttattcataaaatattttcctttcgttatcagtgtaccaaaaaaggccctacttcggcagtaggacttttatagctcttcagcatctacattataatcaacaatttcaaatgaaccgtcatcgtgcaaaattccacgagtaacgctcccattatttggaaaaacaatatcgtttttgccattactcttattccaatattttatggacaaagttttaataaagtcaccatggctaactaacaaaactctttgttcatctttagttaaatcgcgcaaaacgtcaattgcccgtaccatccgctcatctaactcatcctgattttccgctaaatgacgcggatcagccttttttgttgctgcacgaaatttgcgcaagcctacctgattgatgatcttagttacatcatcttcatggtcaattcctgcggctagtgctacttgttcccaagtctggttaatatcatcgccttcaaaagttccaaagaagacctcacgaaattcaggcagctttttaattttaccaatatccgagaccacattagcatccttcatcaagtgaacggtatcaattgctctcttcaaatccgatgaatacatgttatcaaagtgaacttgactcaaggccttagcggttctctttagatcgttaatccccttcacggttagaggagaatcgcaccaaccctgaactttgtccaattggttaaacattgtttcaccatgacgtaccaaataaacttctgttgccatcaaccttagcccccttttcattgcttaatattgtaccaaacttattgcagatatgccgtataaaagaagtaaccggcttgaatgaaggccaagcttgcaatgaaaattcgaactggcttttccggtactcgtcttaaaatagctggcccaatatagccaccaatgaacatcccgattgccaaaggaattgcctgaagcccataaatatgagaggtaaacataaatataatcaaggctactaaattagcaaaaccacaaatcacatttttgatagcgttaataacaataaatttatcattggtaatgtaagttaaaagtactagtacgatgactccaccagctgcaccaaagtaacctgtatacatccccatgactaaaagtgcgagaaaataaattattttaagccaagtaggctgtgtcttagtatttaaactatggtgtttaccagaaacaataatcatcaatcctgagaaagcaataaagaatggtactgctttttcaaaaatctttggaggaaaagatagaagcaaaatacaacccaaaattgatcccacaactgtaaaaatggtatagaacaaaacttgcttccaatgtccttttaactccttagtagaagatacagttgaaccgatgctagtccaaattagcgccgcatcattagttacattagcaaatactggtggaattcctactgctagcaaaactgggtatgatgcaagtgatgccattgaggccactgacgataataagccacctgcaacaccacctaataataagaaaattacggtccagattgtcattttttaattcctttcctaaaattgtctagttcattataattctaataggaactaacacaaaggaagtttattcatggctacatttgaaactttaatttttattcccgaaggcagtttattaaatgaaaaattagcagaaaaaactgcgctgcggcaaactttaaaacattatggggtagactggggaccagctgagcgactacgctacactagcttagaaaaagaatttaaaaatttatctagcaatgatcaaatcgatttagctttatctacatttttaaaagaagatctttctaaaacgcgaactgtttttgatgatgcaatgaaggatcaaaccaggttagtcaagggcgccatcgactttattgatgaagtcagtggcaagctgcatttgattttgcttgctaaagaaaagcgcactcaaatcgaaccgcgccttgcacctacagaattgctttcttcatttgacaatgcttatttcgccgatgattttacggacaagctgccaagcaaaaatattttctttaagattctgaaagacaatccagatattgatccagacacagttttagtaattggaactaatctggatgaagaaattcaaggtgcagaaaatgccaatctaaaatcattatggctggcacctaaaaaagacaagataccaatttcacctcatcctactcttcatttaagcaaattagcagatctttcattttacttagatctaatgtaagtagataattaaaatagttatagaaaggatgattttatgacaaaagttgctgtagtatttgcagacggttgcgaagaagtcgaaggtttaagcgttgttgacgtattgcgtagacttaacgttgaatgcgatatggtaggtttaataagtaaaaaagtagatggtgaccatcatattgaaatcacttgtgacaaagttgtagatgacagtttattagattatgatttggttgcttttccaggaggcatgactggttctgctaacttacgcgataatgaaaaattacgtgatctgatgattaagcgtcatgaagctggcaagtgggatgccgcaatgtgtgctgctccacgtgctcttgctcgctatggtgttttggcagatgcggacttcacttgttatccaggcattgaagaagaatgcttaaaagatgccccaagtgctcatttttcagagaaaatcaccgttactgataaagagcataaaattttaacaagccgtggtcctgctaccgcttgggcctttgcctatgcaattgctgaagctttgggagttgatactaagcaattaaagcatggtatgctttatgactacttagctgataatattcaagacagtttataatttttacgcgtggtgctagttaaatctttctagacaataagccaaattataagctaaaattgcaatttccaaccggctttgaaagcctatcagactacgtgctcgattgttctcggcattgtaataggtcagaagcgaaaagtcgctttcaattgttctgcgaatagccatcaattgatgatcattgtgctttttagctcctgtcatatttttacgatatggtgtccaaagttcgtaacccatttgttttagctgttgatgcagttctttgcctaaatagccttcgtcgccaagaagatagtaattagatggatgggtattttctatcagttcaactgtctccctggcatcatgaactgatgcctttgttacgacataatcaagaatgtaaccgtcatcgctaacaatggcatgaactttgaaaccatagaagtaaattttcttggtggccttataaccaatgttggcataaccgcgaaaaattttagcacgatagtttcgaattggttggcaaacaggtaccggaaagctgtcaatgatcaagaactgtccattcaggtcaacctttttattcatttcttgccgtatctgataaatcaattgcaatagctgacgtgaacgccgattaaaacgtgagtgtgataaacaattgaaacattcacagaatcttctttgtgattcaattcctgtcttagcttgccagataagtaaagccaaaatcagactgtccgtagttttaatttgatcaatatttcgccgatgagtaaactcagccggtgcatacaaacgataccagtgccgacaaattatcactaaatctttaaaactaacttgtaaatggtggctaaaacgcttaagcttaaggcagttcaatcagatcaggctcttttctattattatacaagttgagtctaacaagattggacttttttattaactaaaacgatttaactagcaccacgcgtaatttttatctaaccaacgaaaaaacgatcaagatttttaggcttgatcgtttttgattatttacttttctttcaatttttgattgatttgtttaacatctcgcaataattgtaaaaagtacaaaccataagcgagcaagtacatcaagacaaatactccagtaattactaagaagaaatgaaccgataaagccaaatcattaatcactaattcaaaagcaaaaaaggcaacatagctaacaaaaaagtttacaataatttgttttcgtagtgaccattgcgtttgttcaaaaatcaatcctgtcaaattgaaaaatgctcccatcacaaaagagacaatcaaataaaagagcaaacttgtaaacggaatttgagcatttttccaattcgttcccgtttgaaataaagttactattgaataccaagttaatccaattcccatgccacttattccacttaccaagaaagattccattcttttcataaccctaacctctctttcaagtctttaatttttcttctagaaatttgtacccgcatttggttcttcataatgacatcaatattgccaccatccataacttccaaatgatcaattttttgataattaataattgcacttcttgacgctattaaaaaattatgtggcaaaatatttttaacctgatataattgccctttatacctgtaactctgtgttttgtcataaattaaagtttgctcttgttcgacttgaattaaataaatattttcaaacttcacaggaataatttcatcatcataactgcaccaaatcgtgtcttgttcaccacttaattctttacccaattgactgaatttattagtcatcttttttaaccaaaattcagcactttctcccgctaattgattatcaatgttaaattttaccttcatccctttttctcctttcttgcttatcagtatagacgaaaaaatattttaaatttaaaaatttcggtgaatggttaatattggaaggtaaacggtgaaaaagatcgatattctaattttttaaagaaatgccatactaaaatttaaataagcgaccagagctaatccaatgtcattaagttaagacattgacaattaatattagacttttaaagcactgatttaacatttaattggttaaattggtgcttttttcgtacaacaaataaggcatagcacagattctgcttttttaagctacgcgatataaataatatacagctgatttgggcttaatatttctcttgtccttgcggcctggtctaattggaatggtataatagctgatctgaataaggatccgttcaaaatcttgcgttaaagaagaagccaaatacatgctctgaataatcaagcatgattgcttgaaattgatggcatattgatacttgcaatgcttttgcggaatataggcctgtgcatcaatttgactgattgcattaaacataatcatatgggcataaatttccatttcaataaatttatcttgtttggaatggaactgtacactgcctaaagaatacttcaatttcttgaaggaggtctcaataccccaacgcagatgataaagctctttaattctttttagcggataattttttcgatcaagattggttagcacaacttcccattcttctttgcctgatttggcatcattaattctaaatttgcaggctcgaaattttattgtgcataactcgccaaaatcccagcttagatcctgggtatttttagagcgatacttaatatattggcgataatgatgctggacatggtgaatattctcactggctttatgcgtgatgtagtaatagttagaagtagttaccaggcaggaaatctcacgatcacattcttgatcaggcaatgtcgttatttctttaactccgccttgtccagccttagttcgtattatgtaatgacagttaggcaggcgattgcagttttcaatcatattgaaactagtgtagccacgatccattgttacaatatatggaccacaattcaaagctttaagcatttgaacagccgctttgcgttcatccatttctgatttaggctgaaaaatacaatcctggtaggtattattcaatagatcatataaggcattaacgtgaatttgacaatagggtttctttttatgagaagaagcttgtacaatgttattcgatttcggattccagatttgattaaagtcagagccatcaatggcaaacaaacggtagtgatgatcaaaaagttgaatattaaatagattttgattaaaaacagtcagaatatgtttaaaacaagcaggagaaagctggcttttgcgttgaacataggcagaagtactaactactttatcgttctttttagttgcatcttcgccaaaagctctaaagagttcactgtttaaattctgaccttgcatgttaattgtagttttaaggactgtcgctgcatctaaagtgcgtttcctggtaaaagcatgaggattattaataaaatcgtgaatatgatccccagtattattgataatttgatcaagacgttctagaatattcttatgaagggctttcataattaacaccatctttctggcaataattttgaaggtttaaaatatataatatataagataggcgaaaaggctggtcttttcgcctttattttatacaaaaaaagagatcgaatccaaatgattcgatctctaaaaaagcacccttaattgtcaatgtcttaacttaatgacattggagctaatccagtcgctttattttttgtagtctcaattgcaaaaataattaattatcattaagattaattgcaaaatccaagaaaatgcccataaaaagattaatacaacgcctacaactataataaccattgcacgagaatctaatcccatttggccgagattaacatcaattattatcgttactgcacctaaaacaaaaaggacccactgtaaaatattgaatgcttgattattagttttagtttgaataaatttatcgcgttcatcatcttcttcaatcttggctataccgatatatttagtactatagaaataaccgactgtcaaacagatgcccaatattaaccaaataacatcttgaatataattgacgctttttctatttgcaacatcataaattaattctaagagctgtatgactgatagaatcgcaaaaagaattgtaagcattccttcctttggcttgctcattcttcacatactcatttaagcaaaataaagtttcaatatctgtctcaaaaaattgtactaatttataagctaaaacaatcgatggtttgtaccgacccttttctaatgaaattattgtccgttctgtaacaccaactttttcagctaactcgcgttgtgtaagttgatgttttttgcggtattccttaattttattattgataatcatcatccctaaaatatgaagcggacttcatgaaatatacttcatatgtagtactttctaatgacaagacaatactttattgactagcttcattttttataagtctaacaaaaaacacacctgattgggatgttttatttatattccattaggtcaacttcaacactaaatgattcattacctggcatcttgccactttcatgtttaattgttatgaaaccttttttgagataaagcttttgtgcaggattgccctcaagcacttctaaataaaatggcctggtcgaattttcaagcgtaaaatcaatcagtttactaccaataccttgtccttgaactttaggatcaacatagagccagccaagctcttcttcgttaaatccgacaaaaccaacaactttattttcttttgttgcaacgtaaacttgatagtctcccggatttaaaattgaagtgcaacactaagtgttaaacaaaaaggccatgaagacctaaacttgaagtgacgaaaaatcaagaaaggaagatcttcatgaccaattcaaattctagcatttctaagcactatcatcaattaaccagcgtacaacgtggacaaattcaagcaatgctggattccggcataacttcccgtactgttatcgctcaagaagttggctgccataagtcgacaatcagtcgcgaaatcaaacgcggaagcgtcctgcaaagagacagcagctatttattgtatgagcactattacgctgatactgcacagatttattatgagaagcgtcgcaaaaactgctatcagcgcaatccattgaagcattatgctgtctttttgagaatgctctccagacgctttaaagctaaatttgatgccaccagcatcgatgagttcgttggtgaattcaaaaggactatgccaggctacccttgtcccagcacaccaaccgtctatcgctatattgatcagggcttgctggacataagcaatattgatctgcctatgaagctcaaaagacgcaggaacaagcgtcatcacagccatggcggtcacgctttgcacaagaagcatcttggcaattccattgaacagcgtcctaaggaggttgaagacagaaaagctccgctgcactgggaaggagatctggttaaaggcgtcagacgcaagaatcagcctgctttaatgactttgactgaaagaaccacacgctttgaagtagttatcaagattcctgactatcgggcaagcacatgccaaaggctgcttcaaaaggagattgacagacatcctgcctggtttaaatcaatcacgtttgacaatggctctgagtttgcggatatgaccaagatcaagggctgccagatttactttgctcacccatattctccatgggaaaggggcaccaatgagaactgcaatggtcttttgcgtcaattcttccctaagggcaagagcatgaaagacaagtcaaaagcttatgttcaacaggcaactgatgccattaaccacaaatatcgccgaatcctccaatatcacacagcagaggaactcttcaagcaatatatctcttcataacctaactgttgcacttaatttgacaattcaggaacttgatagtcttcaaataattgctctttctttgatgctattttgaatggaataaatgcagcttcaagattggcaaattttaattcttgctttcgcgcttgatcgtggatgttgcataatttttcgaaatctgcgtcttcatatgatctaaaatttaacattttaaatttctccataaaaaatgtgatcatttgtggcctcttatttcattaaaacaaaaaggtgaaaactaatatgtacaaaaatcatatcacaggtcaaacagctttaacactcaatttggattttaccattcccagcaatcacttggctaatgctatcagctggattgtggattcgattccagaagctattctgctttacaccctgctaaaacaggtcgaccagtataccacacagcagtcatgccaatgaactggttaagaagagctttatctactttaccaatctgttggctgatcaacgagggggctgtttttattgatggcactaaaattgaagctgatgctaaccgctacacttttgtttggcgcaaggctgtcgaaaagtatcatgataagctgaagggccaggcagttgaagcttacgtcagaactggaacaattagctaagacagctagcggtcgccagcgtcaagtacgctataaccctaactggcagtatttaaaagaaaaagcaaaagaagttcttcaaagcgaagaaggcaaacacatctaagaggcaaaaagaaagttgaaaccgatgttggaatagccttcatgatgatgaatataagcaaatattggaacagaaaatgaccaaaagaccgtttttatttaattttaaaagaaaaaaggacgattaaaactcacttaagaattttgatcgtcctattattatggtctaagagttagttttttcccagacactttattttttacttaagacctgtccacttccactcagtgacttcaggaatgtctttaccattatcacgaatgtattggtggtgtttagcaagcaagtcatccatttcattgatgaagtctggattcttacctgccaatgatggaatactttcaacagcatccttagccaagtcgaaacgatcaaggtggttcaggacacgcatgtcaaatggggtagtaatatcaccattttcttcgtaacagtgaatatgtatattatgatggtttcttgcaaaccagattgattccatcatagtcttgtatccatgccatgcaaagattactggaatgtcacttgggaataagcgatcaaactctttatcagagatagcattcttattatccttaggactcattaatttcatcacatctactacatttatgtaacgaatcttaaggtctgggaaacgcttgtgcaagatatcaattgcagctaaactttccaaagttggttcagtttcagttgaagcaaatacaatatctggcttatagccttgatcagttgaagcccagtcaatgtaactcaatcctttatcagctaatttagtagcttcttcaattgagaaccattgtggacgaggctgcttagaagttaccaaaacattgatgcattctctgtctttcaaagccttgtcgccaactgccaaaagcgtattagtgtctgatggcaagtactcatgaacaaggtctggacgattcttttcatataagtgagtcaagatgcctgggtcttggtgagtgtaaccattgtggtcttgttggaagacagttgaggttgcgacaaagttaagtgatggatagtcatgacgccagtattgttccttagcttttcttaaccacttcatgtgttgggtaagcattgaatcaactacacggccaaaggcttcgtaagtagcgaagaagccatgacggccagtcaaaacatagccttcaaggaatccttcatcttggtgttctgacaattgtgaatcaattacacgaccacttggagctaggttttcatcattaggttcatgaatttctggttcccattgacgcttttgatcatcaagaagtgcaaacaaacggtttgacttagattcatccggaccaaagccacggaatgtgtctgggttaagatcagcaacttcgctaaggtatttagcccattcaaccatatcttgtgcttccatttgacctggcttaaacttcaatgcgtacttgcggtaatctggcaagttcaaacgcttagggttcttaccaccattagtaactggattcatggccattctgtggtcacccttagccgtattttcagtaacgatcttcttaggtgaaccatcttcattgaataattcttctggcttgtagctcttaagccatttttcaagcatttccttatgttccatatcatcttgtgcaactggaattggaatttggtgagcccggaatgagttttcaattgggttgccatccaaatccttctttggaccagtccagcccttagggcattgaaagataatcattggccaatgtggcaaagtagcgtcattgttttcacgggcatgcttttgaatagccttaatttcttcaatgacttcatccatagtcttagccatttcttcgtgaacctgcattggatccttttcaccgtcaaaacgaccgcctttaaagactgaaacaaaatgaggatcccagcccatgccgcggaagtattcagttaattctttgtcactcatacgagaaacaatagttggattagaaatcttaaacccattgatttgcaaaattggtaataccgcaccatctttaattggattaataaacttgttactaaaccaactagctgcaagtggaccagtttctgattcaccatcaccaatttcaacagcagcaatgacgtcaggattatctaagatagcaccagtaccgtgtgaaagtgagtaacctaattccccaccttcatgaattgatccaggagtttcaggagcagcatgtgatgccacaccacctgggaaactgaagcgcttaaacaatttagccatacccttttcatcttgggtgatctctggatagcgttcagtgtatgaaccatccagatatgagttagaaaccattacttgaccaccatgacctgaaccttcaatatagaacatatccagatcatacttctttaacactctgtttaagtgagcataaataaagttttgcggagcaatagttccccagtgaccaattggctttggcttaacatcttcagcaactaaaggtgttttaagaagtggggccttcattaagaaaagttgaccaactgataagtaatttgctgcacgccaataagcatcgacgctctttaaatattcttttgaatcgtaatctacagccatgatgtcctcctatagaccatcgttatgtaaccgttttcccttacaagttaataatatcatttttgctaaagagttcaactactttcaaaattgataccatccaattttaaaatatatgaactctattcaatattttttaattctgccacatgaaatagcaaataatcaggatgttcattctttaagctatccacactaaaagcatcccaagctgctccacaagttttaacagacgctgatttgcccatttgcaaatcataacgagcatcccctaccattacactttgtttattattcaaattgtatctgtctaaaagtatcaaaataccatctggggctggcttataatgctgaacctcatcgcatcccacaaagtctttaaaatattgagtaattttcaaattatctaaatttctctttaaaatatcatgacttttactggatacaacaaataaatttttacctttttgctgtaaatcctctagtacatctcgcattccaggatataaatgtgtattttctttttcatactttccataaatattacggtaggtatcaactaattttttcgcatcactttctgacaattctctattagccattttagggaatgaaacatcagcaggaatacccataaaatctaaaatttgatcatcatctggctcatctaaattatttaacttaaatgcctgctttgtcgcaatcaatgacgccttacctgaactagccagagttttatcaaaatcaaaaaaataattttcaagcattttttaccccttagttttaggcacgctttgcatgatcttttgaatgagcattattttgaccatagtaagcatttttaccatgcttacgataatagtgtttatcaagtaggtattgtggtaaatggcaattagcacgtgttaattgcaaagtatgatagtcttcttccgccacaacttctaagactttagcattataaacagccttagctggtgtttcaccccaagtaaatgggccatgttgtgaaactaaagcacctggtgttgcttcataatcgagaccacgctctttaaaggttttgacaatagtgacaccagtattaccttcgtaatcttcctcaatttgttctttagttaatgcatcagctgctggcacatcagtatagaaagtatctgcatgtgtggtgttcaaagctggaatatccatcttagctgcagcaaatgaaacagcccaaggtgagtgtgtatgaacgataccaccaatcttttgaaaatgattatatagataggtatgtgtaggagtatctgaagatggatttctagtaccttcaaccacttcaccttttaggttaacaactaccatatcctcaggagttaattcttcatatggaacacctgatggcttaatgacgaacagacctttttcacgatcaatccctgaaacatttccccaagtaaaagtaactaaatttaacttaggtaattgcatattggcttcatagacttcttttttcaaatcttctaacattttattttccactttctaatctacaggttcttgttcaattccaacttttttaaagatcttgtcaaagaaagctttggcctctttaacttcagcaacaggatcatcatcaccgttatcacctggccacatttcaatcgtaaaacttccgttatagtctagtcttactaattcacgaagtagtccttcaaaatcaacgcagccttcaccaaatggaacatctctaaacttaccctcaaaaccatctgttactgccagagtatcttttaagtggatggcaacaatattaccaattccattctctaaatccttagcaggatcattttgtggccaagcagagaggttacccaaatccggataggcttgaagccatgggcttctaacttgctttttatattgtttaatatctgcaatgttagtaataaatggatcatccattgtttcaatcgaaagcataatgtttttctttgcagccatatgaacacatttagctaagttttcaacgtataattctctagagttctcactcttttcttcataataaacatcatagcctgccatttgaatattatgaattcctaaatctacacagagatctactgccttttggcacatttcaagagatttctttctggtttctggatctttagatccaagaggaaatcttctgtggccagataacatcaaattattaattcgaatgtcagtgtcccacattaaatctctaaattcttttctttgttccttggtccaatccaaacgtgctaagcgtgcatcactttcatctacagaaaattctaaaaaattgaagcctaattttttaactaaattaaatttttctttccaagataaatcttgtggtaatgctttttcgtaaatacctaatgagtttacagtcataacctatacctgccttttaatacaaaaagagcaatgcataataaacgtttttacgtgcattgccctttctaaaactaattaaggaattttttaatatgagtaaaattaatgattaaccccaaatgcgcttaatttcatctttatactgcttagcacgcgcatgtggatcttccgcatttctgatatcacggccggcaataaaacaatacactggtaagtctttaaataatttcaaaacttccggatgaactccgccggttactgaaaccttaaagcccatgtcaatcaaggccttaacgtttgcaacatctttttcgccccatttttggcctgcaaattttgcatccctactttggtggtaaacaacttgatcaataccattgttaagccattcttgcatacgttctttattgtcccagccttcatataattcaacttgaacttcaatttcttttctagcattaaccatggtaggaacagtagcagcgttaatacaagtcatccaatcagcacctgcatctttgcttgccttaccgaacttagtcccggcatcagcacatttaacatctgctaaaactattttatctggtcccactgctcttaaagcagatacggcctttacaccatcttgataacaaagaatggttcctgtctccaaaacatcaacttgatccattacttgtcttgcgacatttaaagcttcagcagtactctcgcaatccaaagcaacttgtaacattggtaaagccataaattaattctcctaagattatttcttaaacttatttggaatatctgaagcttcgatcttttcttttacttcaggaactgacattacattcttaacgccaattacttcgccacccttttgctttacttcatcaaacatgttcacaaaaggtaatgatgtaaataccacatcatagtttctagcagttcctctagcttctgaaacagaagtatgatctgaaactgtaatttcataacctaattgttccattgcttttcttgcggttctagaaagcattaaactagttcccgaaccattagcacaagctgacattattttcattttaattaacctctattctttaccatgtaacttcttccaaccttcataatcttcagtaatcatgaagtaacctttcttatcggcacgatattgcaattgaggaatcattaccaaaatgattattaaagagcaaataccaacaaagcctaagaatttcatcaatactgtgaagaatggccaaactgtagcccaatcgaacattccgatgtaaccaccgtatttcgccatacctacccaggtagcaattaaggcagacccgcctatttggatcaatccagaaataaaaggcatgatcattgcatatttgaaaccaccacggttatttgaatacaaaccgatagcagcgttatcaaagaataacgggataaatccggcgataacaattgttggtgagtggaaaatcaacaataaaatgatcattgtgaattgtcctaatgcaccaaacaagaaaccaattgtacctgcgttaggtgaaccaaaacctaaggtagctgcgacatcgataccaggaactgagccaggtaaccatttgtctgaaataccagtgaaagattcagtcaattcattaacgaatgtacgaacacctaattgtaagattgctaagaaaactgcaaattgtaatgaagtttgtaagatgtagaaaataaaactttggccaggttgcataaatttagctttaactaagtaatctggacctaatactactaaaattgcaccgataaaaattaacatcaaaattgatgtagataccatattgtcgttgaaaattgacatgaaacctggtaactttacatcttctaatcgtctggcttctttcttacctttctttttggctctattttccaaaaattctgataatttagcgaaaataaagataccaaacatttgttggtgagcgatagcaaagccagcaccatcagttaactcttgagtaatatctacagttaagtttgaaccaacggcccaatataaacctaagataatactcataacgattaaaataggtaaatgacctaattttggaaaacagaacaagatcaaccagaaagcggtagccgcttgttgtacttgcacgttaccagttgtaaaaacagcacgtaatttagtatattttgaaaatcttactaacacgatattgataatgtatgcaaataacaacaaaagcatagtatcggcaaaagatctaccaaactctttcataattccggcagcaactgcattctgtccaaaatatggatcagttaccatcgcattcaaatgaaaacgatcttttaatccgactaaaattggtctaaaagtattgatcagtcaaacagaaccagccgataaaataaagtatccaactgttgctttcaagaagcctgaaaggacctcataccatttctttttctctaagatataaccaagtaagacaataaaaccaatcatgaaagctggttgttgcaaaatattggtagcaaaataatcccatatcttagatagaatatttaatatagccatttatactccccgcttccgatatcacatattatgtttcttcattactgccttataatcgtctaaattcttaaccttagaaagatcatcaatcatgttatcttccattaacatgtcagataaatgggcaatatttttgacatgtgtattattatctttagctgctagcataaagaataattttgcacttttatctgggtctgattcatcgaatgaaactggttctggcaaaattgtaagacctataccagtacctaaaactccttcgctatcagcctttgagtgtggcattgccacaccaggaacaataacaatgtatggaccatatttcttaacatcagcaataactgaatcaatataatcatcagtaactaacttgtcttgcttcattaccttaccagcaactctaattgcttcttcccaagtctcaggatgttcatcagtaatgtttaataaattattttctaaaaagtaacgtaacatcagcgtctcctccctcagctcaacagctttggttaaagacgttgagctagttaatcaacaaaaacgggactatagcatttctgggaatggtaagtctggatcattcttaaatgcatcatggaatccacgatcatacatgtattcgaaattatctttgtcttgtggataatcaaattcaccaccaacttgccaaatatatggcttaaatttatattgcaaacggtactttttacggtcccaaagagctaaaatatccttaggatcactgtagaagttagtccaaatgtcatagtgcattggaataataacttttgtctttaaagcttcacccattctcaaaacttgtgagtcgtcaagcttatcagtgataccacgtgggttttcaccgtatgcacatagagttacgtcaatttcgttttcgttaccgtgctttacgtaagtgtttgaatagtgagagtcacctgagtgatatacgttaccacctgaagtcttaactaagtagttaacagcaactttagccatttcaattggcatagtacctgctaacttcttgtttggatcatcttcggtaacaaattcagttctatcaaaggcttccattgccttaatagttacggccccaaccttgacttcatcgccaggctttacaacaatggtcttttcctttggaacaccccattcgatccattcatcgacaacgccttgaggtccaataaatttagcgtctgggcaatacttgtttacacatgctgcagtgtaaatatccaagtgatcatggtgagtgtgagttacacataaagcatcaagatcacgaagtgcaaatggatcaattacatatggcttgtttctaaggtttggttgtaaagcttcaccaccggtcatacgcatcatttggtgacctttacgcatcttaccgtcaccgtgagtatgtttaccagtaccgttccacatatcaatagcaacgttggtgccttcatgagtcttaatccaaacccccatacagcctaaccaccacattgcaatacttttttctggtacttgcttatcagcaatttgttcattcaagaacgtaccccattctgggaaattgttttctgcaaaagttttgaaattaacatcttctattttttttggtgctgacatgaataaatcctccttaattttcttatcctcgtcttcaatgttattatgcgcttagatgtgagtgctttcaaccattatatatgttaatttagcatattttatgttaatttttgtaaaattcaagtcatttataacactaagtgtataattttttacggtaagttgaataaataattaaaaaagcccaagtcctttgaatttggacttgagctcaaacaaaaagaccagtagtctgatgttaagaacaaaaaacacattagaagctggtcttttatgaattcaattgtaactgaaatcgcaaatattataaagtctgaagataattatattaagcgtgaaagaaaaataatctgtttcttcttaaacctgattaaggaaatcatggccttggctttagctaaagttgatgatgaaatgattaccaaggttaaagcacagggctatcagattgataagaagaatgagcgctcaatcaatatggcttttggcgaagttaggtatgtcagaagaagatatgtctgcccaggcaaacaagcaaggtatcccttggatgaattaatgggctttgacaaatacaagcgctacagtattttagcagtcaaaaacatcttagaagtaagcagcgttgccacttatcgcaatactgctctagcagtcaattgcctgtctggctttaatattagccatatgcaggtgggcaatttggtaaaaatggccgggaaaaatattaaagcgggccaagaagcagattcaagatatgatgccgcaggcactaagaaaaaggtcccagttttgtatcttgaaggcgatggcgtggtgatcaaaggcactaaaagccggttggaatttcatcgctatcaggtctgtgaaggcattgtcaatataagcaagaaacgcagaaagcgaatcaatgccaaggaatttgtttctttaagccgacttgatgcgctgaacgaagccaaggagtacctggccaatacttatgatctttctgatactgtaattcttagcaacgccgatggcggtgctggatatgccaaaacagacttcgatgacattgtagggctatgcaagcgtcatgagcatttcttggatgtctttcacctaaataagaaaatcaaagaaaggctatattttgcgcctgacctgcaaggcaagctgatttctgctttggaatacaaatacagctatgacaaagttaaaactatcctaaccactgcagaaagccgactaattgatgaattgaataccgagctcaatcatgattatctggggcgcctaaggaattatattgatcgtcattgggacgatattaagccgtttaagaaacgaaaactgactgtgactaaagccattggctgctgcgagagcaaccaccgcaagtatacctaccgtgttaaggggcaaggcaagaaatggtcaaaatctggagcagaaggcatgcttaggatcttaagctgcatcaagaatcgagagctggaattttggcttagcagcgagtttgaagattcagaaataactgtattgactgaacaggaattaaaagcagcggcccgtgacagcttaaagaagcgtcatgaagttcatttaggcatccagcatggcgcattaaccgcacaggtagctggcaatagttatttaagcaagctaagcagaaatttaagtcatataaatatttaagaaattaaggttagactaatggtttaaaggctaccgcaaaaacattgacacttactttataacataaaatatgtgaattattattttgaatggtaaaatagtaaccagttcgggtcgttttttatttaaattcaaaagttaatgcttttctggtgaagtattagtaagtatttattgaagtgaaagagatcattaaaaatgaaaaattcaattcaagtaattaaaaaacgtcgcaagcaaatcattgatttactaaatcacacaagggaaatttctatttctgaattaagcaaaaagatgaaggtttctgaaatgactattcgacgagactgtgattatttgtcaaaaatgggtaagatttcaaaaaagcgtggtgtcatatcccttgttgcaccagaagaaatcccattatctcagcccgttagttacattaagcaaagcttaggaaaagaggcagccagatatattcacgatggagatatagtatttattaactctagtagtacagcctttgatgcaattccacatttattaacaaaggatataataattgttactaacaatggttatgctggaaattttgaaaatactaaaagcaaagtgatcttaacaggtggggaaatacatcataaattaatcatgagcggtgatttggcaactaaagcatttctatctttacgtgccaactatgcaattattggttgcgcaggaattagcattaaccaaggtatttcaacaccagttatggaagaagcagaagttaataaaactattattcagcaatcacaaaaggttattgttgttgccgactatagcaagttcaataaattctctaattttactattggaacaataaaagatattgatttattaataactgatacttttgtagaaaacagtgtaattaatgaatttattaaagcaggagtaaatgtaatacaagtacctttaaaatgattagcaatctaaaaagacgctcaaaaattcaaatttagaatctttgagggtctttctttatctaaatgtatttattatttcatgttaacttaagcttcattcatttgcagtaatactttacccttattacctccttgagcaactttaaccatagctgctgcagtttgatttaaggtgaaaatatcaccatagatagatgcaccttagccttggctaatatatctgctgcttcttgcaattgctttccatctgataaacaaaaataaagtaataatgaacttgttatctagccccaaagttaatatgtagttcgtgttgaatagaaaggaaatctttaattgtgaaaaaaataatacgttctcacaactttatgtatacccaagatttagatcatttaccatttagtaaagataagttaaaagattcgacctcactatcatgtaatgcttcatttcaaagatgctaaaaccatttcaagagtatctaagattttcaatgatcatgaacaatatattgaagcatggcacagtattattaacaatggctatagctatctgatccatgaaactactaatgctaagagtaaacatcattatgatccaaaagaagtagtagcttcatttgattttaaagatagaatcaatgagattagacaaaaagtcaaaaagccatcacgacaagcaattgaaaactttattgatgattattcaaatgaaaaaatcactaaagaagaacttcaagaagaaatcggtgttcttgagatggcaaaacataaaacactgttagatcatattgaagacatcctagcttacaaaaagcatcaacggtttttaaaggacttcaaaggtcagagttgtaaggtctactggatatatggtgtttccggaattggtaagactaagttagtacgggaaattttagaaaaacaacatcctgaagatttctgtatttcaggtagtcaacgggatcactttcaagaatacaaagggcaaaaattcatagtaattaatgacttgcgaccaaatgactatgactatggtcaactacttacccttttggatccttgggaaatagacaaaatggctcccgcaaggtatcacgatcgttatctaaatgcgcgtgccatttacatcactaccccttatgatccacttagtttttatcttgaatgtaatattgctaatcaagtcattgattcttttgaacagttgaaaagacgaattatcccgttgcaacttactaaaagcaatactaataaagttaaaaatgatctaatcactgatgataaattatccgaagcaatttggaagataaaatcgcaaaaaaatactagtcatgctaatagagacaaaagcaatgactagattacctactacctagattttatctcaatattggtaactaaacaatctcaggagaataatagtggctaaattattaactcgcgaagaagcttcaaaatatattggtattgatcccaaaacttttgataaagtatttcgctctgatcctgactttaaaagatttaaactaggagaacacacagaacgctttaccattaaaagtatcgaagctttcatcgatcttaaagaaacaaaattgaaaaagatttgagaaatagtcggttatctgctaactttattgctggtaagataatcggcttttcttttgaaaggacgattaaatttatggcaagtattgaaaaacgtggctcatcatatagagccagagtaacaatctatcaacatggaaaacggaaactgtcaaatcttttgtgtaaatagatctttctcgtaaattgattttttaattatttatttaatcaaagtaggattctaaggtgtcctgaacctgaccaaagcctttatgaattcgattgaaataacggtcattgtagctcattgcctggatgccaataaatgcatcaagcgactgttcagttggaaattctgccttaggcttagctttacgcttgatgacgttgttaaaggattcaatcatattggttgaataaattgaagctctgatttgtttgggataattgtagaagactagcagatcgggctcaatttccttcaaacctttgatgacatggctataagctttattccatttggcatagaatttgtgcaagacagctgcagcttcttttttgtttgtctgttgatgcacctgtttgaattcgttcatgatcttttcacgatcgtcgacgcgtactttagcgcagatattgcgcatgacatgaaccaaacagcgttgaaaatgagctttaggataagtcctggccaaggctgttttcatgccaacaacaccatcagaaagaaagagttcaacttgcttcaagcctctggacttcatgttttgaagcatctctgtccagacttcaatgttctcactaggagcaatgcagtagtcaatgacttccttatgtccattaggtttaatgccaatggcaatatagactgcttcacgctcaaacgtttctcggcgcaaaggaaggtatgtcgcatccaaatagacgcagaaaaacttgtcgcttagcttgcgtttgtggtaagcctcaacctttggaatcatctgcttggaaatatttgatacctgagctggactgtaatggctgccatacatcttttcaattagatcggctatttccctggtggtcacgccattggagtaaagcttgataatcatgctttccaagatatccgagtgctgcttgtagtcaggcagcgtgtgctgatgaaattgaccgttgcgatcccgaggcacttgcacttcaattgggccaaattgcgtatcaactttgcggaaataagcaccatttctagagttgccagtattccagccatttctggcatagggatcatagcccagaaaggcagtcaattcagcttctagcaagttattaacagcctgttgtagttctttgcgcaataaatcatttattttgtctggattgaatagagcttgagcaaaatctttggtaaaatcattcatgaaggagttcttctttctgtatgtgtttttttgttcaaaccaatcatacgagaaaggaactcctttttctaatgtttaaagaaataaatttaaggaatcattcatccttacacaaactattttacagtctcggaaaacgtgattacttaactaagagttttaaaactgaaaaagaagctaaagtttggagtactactcttgaactacaaaaggctaaaggtcaagcaatagcccagcaaaacactttattcaaggacttttattatttattcgttcaaacagtaaaagtacatgacgttagaaaagcaacttttgataattatgttaaagctggtaaagtaattgataatctttttccaaccgctaaacttggtaagcttgatgacgtacaaatgcaaagtatcttagataaatatggcaaaacacattctaagaaaacggtaactgaattacttaagaaaattagaactgctctccgctatgcttatgttaagggatacatttacaatgattttgctagtttacttaaagcacacggaaaagaattacctaaacgcaataaagcttcatcaatgtctgatctaactaagttaaaacattacttacttgaacatacagataatgaatttaacttaatggtattacttgagattagtactggtttaagacgtggtgaaattttaggtattaagcctgaggatgtgcattacgatggtcagtattattgcgttgaagtaaaacgatcaattagccctactactgacgatactaaattaaaaactaaacattctagacgcagtgtgactattcctaagaatatttacgatctattgaaggatatctctcaaaaagattctggctatttgtttgactggttcagctttaaacagtctggtatgttaaaagaattgctcaaaaaaataggcatcccttcaaccacatttcatggtttaagagatacccacgcttcttttttattcagtaataatattcctttatcttatgttagcagaagattaggacacgattcaatcttaactactgaaaaatactatctggaattaatgccagaaaaaaagcactcgcaagatgcgaatgctttaaatctattggaatccctatagcattgtgaccataggtgaccaactgaagtctccaaaacgttgatataacaacatttttgaacgtaaatattaacgctttgagaattgagaagctttacgggctttcttcaaacctggcttctttctttccttcattcttgggtcacgggttaagaaaccggccttcttaagtggactacggaagtctgggtcaacttcaagaagtgcacgagcgataccaagacggatagccccagcttgacctgagaaaccaccaccgttaacattaacgtgaatgtcgtattgaccttcagtttcagttaatgtcaatggttgcttcaagtccttaaccaagttagggaatggaatgtattgatcaacatctttatcgttaacagtgatcttaccgttacctggtactaaacgaacacgcgcaactgaatccttgcggcgaccagtacctgtgtatgcagcttgttgtgccattatataacctcctagattaatttgttaatatctaacttttcaggcttttgtgcttcgtgcttgtggtcttcgccagcataaacatgcatcttcatgaattcatggtgaccaagagtgttctttggaagcatacccttaactgagatttcaaccatcttaactgggttattagcaagcaattcaccgtatgaaacggccttcaagccgccacgccatgatgagtggtggtagtagaacttgtctgaagcctttttaccagtcaatctaatctttgatgcgttgataacgataacgttatcaccagtatcaacattaggtgtgtattgaggcttgttcttacctctcaaaatagtggcaacagcagcagaaagacgaccaagggttacgtcagttgcatcaataatgtaccacttacgttcgatttcactagattttgctaatggtgtagtacgcaatttaaattcctccgtttatttgcagtttgaaaacaataagtttccggggcctatcgtggacaaacatactatattagagtacgtccttttaggcaaaatgtcaattataaatgctgatctaagcgatatttttgtggtacttcatcataaaaaacatgataaagatataaaccgctggcatgagctgtttgtctcacttcttgtcgatcttttgccgcgattacccgctgcaaatcatgcactggtctacgatcattcccaatctcaagcaacgctgctaccatgattcgaaccatattatataagaatcctgaaccaatgaagtcaaaaatcacttcattatcttttttatcctctgtgatttttacataataaattgttcgcactttatcttcaattcgaccaccactagccgcaaaactagtaaagtcatgttttcccaacaaatcttgtgccgcaatttgcatcttttcaatatctagtggatatggaaaatgtcctgtataaaaacgtttaaatggattaacaaaatgatctaaactaacacgatagcgataccatttccccttaatcgaataacgcgcatgaaaattctcatcaacaatttggcaatcatcaaagataatatcggttggcatcatagaattcattgccaaaatcattcgattggctggaatagttttaccaggataatcaaaatgaattacctgtccaaccgcatgtacaccggcatcagttctacctgacccctgcacaatcacacgctgccccttagtcattttcttcaacgcatcttcaattgtcccctgaacagttcgctggtctggttgaagttgaaagccatgaaaaagatgaccatcataagccatcgtcattttatatcttgtcgtcatatttctaatatgtcctaaaagttaatagtaatccgactaacagtacaaaataaaataatgcaattaaatcatattttgaccaacttaaaacgcgatatttagttcgtccttcactactacgataaccacgtgattccattgctgtagataaatcaattgccgtttctaaagactgaataaacaacggaaccaaaatgggcgtaattgccttagcacgttgaattaaaccaccgtcattgaagtccgctccacgtgatctttgcgcattcataattttaaaagtctcatcaaacaaagtcggtacaaaacgaagcgcaattgaaattactaacgcaattttatccaccggcactttaaacaacttaagcggcttaagcagccattccatcgcatcagcaatttcaagtggcattgtagtaactgtcattactgttgaaattaaaataattaatgtaaaacgaataaaaatatagattgcattaatcaaaccatagctagataatgaaaaaatccaccaatgccaataaatatgaccaccagtcataaaaaacaattgcaaaagcgacgtaaagaaaattaaaccaatcaaaggcttaacgccatcccaaaatacttttgcatttaatcctgtagcgatcacagccaaaaaacaaaaaatggtcacaatcgcataagttattgaattattagctaaaaagatagccaatataaataatatggtaactaataatttactccgaggatccattttataaataagagaatctcccggaatataacgtcctacaattatcttactcataaactaccctcgcaaatttttcttaatttcattaataagctgatccagtgttaacggtttatctttaaagttaaagttcgtcaaatctgaggcaaaaagactagccgttggttcactcaaatagtgcttttctagccagtttttattagtaaaaatcgccttaggcgcatcatgtctaactaatttaccatgttccatcactaaaacatcatctgcatattcggccacatcatccatattatgcgtaaccaagattacagtatgacctgctttttgatagtcaacaaataatttcatcatttccttacgagacttaggatctaaccccgctgctggctcatctaagcataaaatttctggttcatcagccattaccccagcaattgcaacacgccgcatttgtcctccagataactcaaatggcgacttatttgctagcgatttatccaatcctactcgcttcaaccatttcaaagctttacttttagcttcatcatcggttgctccaaagtttttaggaccaaattcaatgtcttcaagcacagtattttcaaaaagctgtgcttcaggaaactgaaaaaccaaactaacccgcttgcgtaactttttcaaattcttatttcctgtttgagcagtaatatgataaccagcaatatcaattgttcctgaactcggcttcagtaatgcattaaaatgctgcatcaaagtcgacttaccactaccggtatgacctaccaatgcaacaaaactattttcagttaattcaaatgaaacattatctaatccttttttctccattgaagttccgggagaatagatataatttactttttcaaatttaattgacatagatattgtttcaactcatctttcgtttttatatttttaggtacagaaattcccacttcatttaatttatttattaatttttgtacaaatggaatgtctagccctatttcttgcaacatttcagttttactaaaaatttccgttggagttccttgagctaaaatcttgccatcatttaagacgatcacattatcagccatattagcctcatcaatgtcatgtgtaatcgaaataactgtcaaattcttctctttctttaaatgcttaataatttttagcacctgctctctccccttaggatcaagcatcgaagttgattcatctaaaataataattttcggttctacggcaagaatacctgcaattgctactctttgcttttgtccaccagaaagattagctggctctgcatctatataatccagcattccaacgtctgctaaaacttttctgactatttttaccatttgctcccgaggaacagctctattctcaagcccaaaagcaacatcatcgccaacagtagctccaacaaactgattatctggattctgaaatacaataccgactttttccctaacatcccagactgtcttttgatttaacgtcattcctaaaacagtgattctagaattattagcagaatcaggcaaaagtaacccattaattaatttagaaattgtggacttaccgctaccgttgtgacctatcaaagatgtccaggaacctctttttattttaaaactaatctgatcaagaatcgcttttttagtatcgggataggtaaatgagacatccttaaattcaacagcactatctactggcatttttccacttcctttcttaaatcgcttattagcatattgtaacagaaaaaaagagcaaaaaaaatcacccatgaagagggatgatttttatcatctaagctagactaagcttgcgccatcatctttacgcttattctcactttcatggataattcttaatacgtattaagttgtgttactctaaattaaactaattcaagaataaccattggagcagcgtcacccttacgaggaacggctaacttcaaaattctggtgtaaccaccattacggtccttgtaacgaggtgctacatcactgaaaagcttttgcaatgctgacttaacaacaactgcatctttttcttcgtgaacatctgcaacttcgtcacgtacaaatgcagcagcctttcttctagctgctaaatcgccgcgcttacctaaagtgatcatcttttcggcagtcttacgaacttctttagcacgagtttcagtagtaacaatgcgttcgttcatgattaattgagtagtcatttctctaagcattgcttttctgtgagcactatcgcgacctaatttacggtatgccatggatttgcctcctttattcacctaagcttagtcttcttgacgaagtgaaagacctaagtcggttaatttatttttaacttcttccaatgatttacgtcctaagttacgtacacgcatcatatctgattctgtcttgtcagttaactcttgaagagtattaatgccagcacgcttcaggcagttatatgaacgaacagaaaggtcaagctcttcgatagtcatctcaagcttcttttccttcttatcgtcttccttttccaccattacttcgctgaatttagcatttgcatctgctgattcaaataccttaaagtgttcaactaaaattttagcagcaaaactaagggcgtcattaggcttgattgaaccgtcagtccaaatctcaaaagtgagcttatcaaagtcatctctcttaccaacacgagttgattcaacttggtagttaaccttcttaattggtgagaataaagagtcaactgggataactccgattggcatgtcatcactcttattgtcacttgcagcaacataacctctaccattctttacggcaagttccatatgcaagtgtccaccttcagcaatggtacaaatatattgatccggattcaagacttgaacgtctgcatcaactttaagatcatcagcagttactgtggctggaccttcaatgtccaattcaataaccttttgttcatctgaaagagactttaattcaagtttcttcaagttcaagatgatcttggttacatcttctctgacgccaggaactgttgagaactcgtgtaaaacgccatcaatttgcacataaacaagtccagtacctggaatagaagtaagtaatactcttcttaaagaattacctaaagtagtaccaaagcctcgctcaagtggttcaacaacaaacttaccgtaagaatcttcttgttcaacaacggtaatatttggtttttcaaattcaatcattactgggcccctttcaaaacgttacgtcctatatcaaggacaaaattaaacacgacgacgttttggtggtctggaaccattgtgaggaactggcgtaacgtcacgaattgcagtaatttcaagaccagttgcttgaagtgatctaatagcagattcacgaccagcaccaggacctttaactgaaacttctacatgtttcatgccttggtccattgcactcttagctgctgcttcagctgccatttgagctgcaaatggagtagacttacgactacccttaaagcccaatgcaccagctgaagaccaagcaactgcattaccttgaacgtcagtaatcatgactaaagtattattaaacgttgagtgaatgtgtgctacaccgctttcaacatgcttcttcacacgacgcttacgtgctgttttctttgcaggcatcaataaacctccttataaataaaattaacgatttctcttagtacccttacgagtacgagcattgttcttggtattttggccacgaactggaagtccacggcggtgacgaataccacggtaagaaccaatatcaactaaacgcttaatgttcatgcttacttcacgacgtaagtcaccttcaacacggtacttgtcaacttcagcacgaagcttttcttgatcttctggagttaaatcctttgaacgaatatcttcagatactccagcatcagcacaaattttcttggcagttgcttcaccgataccgtaaatgtaagttaaagcgataacgattcttttatctcttggtaagtcaacaccagcaatacgagccataaactacaccccctctatttctaaccttgacgttgcttgtgctttggatttgctgagcaaattaccatcacacggccatgtctcttgataactttacaatgttcacacattggtttaacagatggtctaaccttcatgtttccctccgttatattactttataaaccgatacgtaattctacctttagttaaatcatatggagataattccacagtcacacggtctcccggcaaaatacgaatgtagtgcatcctaattttaccagaaacgtgtgctaaaattgtggctccattttccaattcaactttaaacatagcattaggtaaggtatcaactaccttaccttctacttcaatgacatcatcttttgccaaagttgttcctccgcaattaaacagtcatatactttgaaattataacacggataaaaaattatacaaatttttcttctattgattattactcaataccgcatcaatatcttcaaagactttttctggagtttgttcaccattaattacagtgagcaagcctttcttctgataaaagtccttcaaaggtgcattcatcttttcattaacttcaagacgattcttaacaacttctggtttatcatcttcacgttgataaaattcatggccaccacagcgatcacaagtgccctcaacttttggctgcttggaaagcttgttgtaagtagctccacaatttttacacatgtatcttgctgataaacgcttaatcaaagtgtcttcgtcaacttcaagcgcaatgacatttgttaaaggtttctccaaacgttttgtaataccatctaaaagttctgcttgtacagtggttcttggaaaaccatctaagataaaaccttctttaatatcaggttgacttaaacgttcctcaaccaactttgcagtaacttcatcgggtactagattacccttatcgatataactcttagcttcaagaccaaccttcgtcttgttagccattgcttccctaaacatatccccagttgaaatatgagttaagtgatatttatcaacgattcgctctgatgctgtacctttaccagcacctggtaaccctaaaagaattaagttaatcatttatccgttcctatctgatgaatccaacatattctctcttcattaacaagccgttaatttgacgagataactcgagaacaaccccaatcacaattaaaagacttgttcctcctaaaccaatggaacttgggagattccaaaagttagtagccaattgaggcagtaaagcaactaagcccaagaataatgaacctactgttgataatttcatcaacatctttgaaatataatcctgagtatcttttcctggccatacactaggaatataagcaccctgcttttgtaagttttctgctagcttctcagggttgacctgtacgaaagcgtagaagaatgtaaataagataattaaaagagtgtagataattaccccaggagtagtttgtaagctaaagatttggttcattactttaaaccattgttgatcgccctgggttctttgaaaggccattaaaatcgttgccggtgtaacaataaatgaactggcaaaaataaccggaataactccagatacattaacctttaatggtagaaaactttcagaaccactcatcgtcgctcttctcgtatattgaattggaatacgacgatcagcttgttcaacccatgtaacaaattgagttacgataaggattgcaactataaccgcgatgaagaacaaaatgccttgccaacgatcactagcactattattaataatttcttccttataaatttgccatagaccacttggtagtcttgcaataataccagcaaaaataattactgagataccattacctagacccttatcagtgatttcatcacccaaccatgttaataacatagttccagcagtcataataatagcaatttctatataagtctgtggtgtttgattctttaccaaacccatttgagttaaagcgttaaagcctaacgtaataccaatactctggataaaagcaacaactaatgctaaatatctagttacttgatttgttttacgtcgacctacttcaccttgttttccccattctactaacgtaggaacaatatccatctgtagcagctggataacaatctgagccgtaatataaggagaaacacccaaagaaaatattgaatagttatctagtccaccaccagatacagtatccagcattggaactaaaccagtttgcgcaacctgcgtgatcgccttcgcattaacaccgggaacggtaatgtttgcaccgatccgatacagcaaaagaataaagagcgtgaaatagagcttatttctaatttctttatctttgaaggcgttcttcaaggtcgaaaacattagatcacctcaacagttccgccagcggcttcaactgcttgcttagcagatgcggaaactttattaacctttacagttaacttaacttttaattcgcccttgccaagtaacttaacacctgacaattctttctttactaagccattatctttaagtgattctacagttacttcactgccgtcttctaacttgtttaaatcatctaagtttacaattgcatattccttgcggttaatgttcttaaaaccacgcttaggcatagttctgaataatggcatttgaccaccttcaaaacctaaacgagtatgaccgccttgacgagctaattgacccttttgaccacggcctgaagttttaccgtaaccacttgaagtaccacgaccaacacgttttctattgcgacgtgagccttcagcagaatgtaattcatgaagcttcattaatttggcacctccttgatattctatttgttaatctcttcaacagagattaagtgagcaatctttaataatgcaccacgagtagcagcgttgtctggaagaacaacagtactatccactctacctaaaccaagagctttaacgatctttctttgttgaggtagacggtgagcaacacttctaattaaagtaatctttaaatcagtcatctatgatctccctaatcttaagctctttcaggttgacgaagttttgcaacttcttcactagttctaagcttcttcaaaccatcgatagttgcacgaacaacgttaattggagtgtttgaaccaagtgactttgaagttacgtctgagataccagccatatccataacgatacgtacggcaccaccagcagcaacaccagaaccagcttcagcaggtttcaataaaatgttacctgaaccgtagtgaccaataacttcatgaggaatagtagtaccaactttaggtacattgatcattttcttcttaccgtcttctacagccttacggattgcttctgggacttcttgagctttaccagtaccaaaacctacacggcctttcttgtcgccaacaacaacaagagcagcaaatctcatgcgacggccacctttaacaaccttagtaatacggttgacagcgactaattgatcttcgatatcgtctttgtttctgcgattgttacgagaatcattgcggtttgccatgtgttaattctcctttcctagaaatctaatccgttttcacgagcagcatcagctaatgcttgaacacggccgtggtataagtaaccacttctgtcgaatacaacagtagaaatgttttttgcctttgcagcttcagcaattgccttacctacagcagcagcttgttctactttagttgcatctgatacattttcatccaaagttgaggcgcttgcaagcgtaacacccgctacgtcatcaattaattgagcgtagatgtttttatttgaacgaaaaatgcttaagcgtgggcgctcagcagtaccagaaatttttccacgaatacgtctatgacgctttaagcgtaacttgtttttatctggtttagaaatcacaatttcacctcaaaaataactacttattacttaccagtcttaccttccttgcgacgtacgtattcatcaacataacgaatacctttacccttataaggttctggtggacgtacggcacggatttcagctgcaaattgaccaacatcttgctttgaaacaccttcaacttctacatcagttgctgaagttgcctttacagaaacaccttctggtgcagtcaatacaactgggtgtgaataaccaacatttaaagtaatcttgttgccttgtgcttgtgcacggtaaccaacaccgattaacttcaaagtcttcttataaccgtcaactacaccttcgatcattgaagctaagttagctctttcagtaccgtgaagtgctttgtcgctttcgcttgaacgtgaaaagttaatttcaccatctttttgttcaaacttaatctttggatcgaagtatctagttaattcaccctttgggcccttaacagtaatattgtcgccttccttggtaacagtgacactgtcagggacttcaatagtctttaaaccgattcggctcattgattgttctcctttctgtcagtattaccaaatgtaggcaattacttcgccgccaacgttcttttgtcttgcttccttgtcggtaataacaccagcagaagtagaaacgatggcaatgcctaagccattaagaactttaggtaagtcttcagcgccaacgtagtttctaagacctggcttagaaatacgcttcaaacctgagataacacgttctccatttggaccatatttcaagaataccttgataacgccttgcttgttatcatctgcaacttcgtaatcacggatgaagccttcacgtttcaaaatttctgaaatagactttttaatgtttgatgcaggaatttcaactgaatcgtgttttgccatgttggcatttctgattctagtcaagtaatctgcgattggatctgtcatgaccatttaagctatcctcctaaccgtatactaccaactagcctttttaagaccagggatttgacccttgtgtgctaattcctttaagcaaatacggcataatccgaatttacggtatacggagtgtggacgaccacatctctcgcaacgtgtatattcgcgtgaagagaacttagcaggacgacgatttctgattttttgtgatgttttagccattaatgtcctccactatcttgcaaacggcataccaaattgagtcaaaagttcacgagcttcttcatcagtgttggcagtagttacgataacaatatctaaacctctagtgcggtttaccttatcaaaatcgatttctgggaaaatcaattgttctttaatacctaaagtgtagttaccacgaccatcaaatgaacgagttgatacaccacggaagtcacgaacacgtggaagagaaacattgattaacttgtacaagaaatcgtacattctgtcgcctctaagagttaccttagcaccgatagacataccttcacgtaaacggaagttagcgattgatttcttggccttagtgattaatggcttttgacctgagatcaaagttaattcttcaactgcttcatctaagttcttggcgttagaaactgcatcaccaacacccatgtttaaaacaatcttgtcgatcttaggtacttgcatagatgacttgtagttaaacttttcttctaatgcaggagctaccttttcgttgtattccttagctaaataacttgccatgtgtgtcctcccttctacttatcttcttttttactactaattactttaacgtttgatgcgtgaattgaaccttctgattcaactacaccaccattagcattgctttgtgaaggcttttggtgcttcttaatcttgttaacgcccttaaccactacacggtttttcttaacgttaacagaaagaacagtaccttctttacctttatcttttccggcaataacttttactttgtcaccagttttaacgaacatcagtgcacctcactatcaattataagacttcaggagcaagagagacgatcttcataaagtcgttctcacgtaactcacgtgcaactggcccaaagatacgagtaccacgtgggctcttgtctgcgttgataattacgccagcattttcgtcgaacttgatgtatgaaccatcttcacgacgtgcacctgatttagttctaacaataacagcttttacaacgtcgccttttttgacaacgccacctggtgttgcttgtttaacagtacatactacgatgtcaccaatgttaccggtcttacgctttgaaccacctaagactctaataactaaaagttctctggcaccagagttatcagcaacctttaaacgggattcgttttgaatcactgtgtaatcctcccctcactaaatccgcaaattaaacagatttcttaacaatctttactaaacggaagcgcttcttacgagataatggacgggtttccatgatacgtacagtatcgccaactttagcttcgttattttcgtcttgtgcgtagtacttctttgaatatctaatacgcttgttgtaaacagggtggttcttgtaagtgtcaacaactacaacgatagtcttgtccatcttatcagaaactacacgaccttggtatacgtgacgacgatttctttcgtttgtttcgctcaagttaatagctcccttccattaattgttttctaacgctttttcgctcagaatagtcttgattctggcgatattcttgcggactttgctcaagcgagcggtattttctaattgacccgttgcttgttggaaacgcaaattgaagagttcttctttgtattgcttttctttttctaacatttcatcagtggttaatgctctgatatctttagccttcattagattcgccacctacttccgaacttctagttacaaacttagtcttaattggtaacttagttgaagcaagacgtaaagcttcacgagcagttgcttcatcaacaccaccaatttcgaacataatcttttctctcttaactacagctacccaacctgctggtgcacctttacctgaacccatacgtacaccaacacctttagcagtgtatgacttttgagggaaaattctgatccaaaccttaccgccacgtttcatgtaacgagtcatagcaacacgagctgcttcgatttgacggttagtaatccaatgtgattcgagggcttcaagaccatattcaccaaaggcaatatatttaccacccttagcagcaccacgcatcttaccacggaattcacgacggtgttttactcgctttggtactaaaggcattatctatttcctcccttcgctggctttgaagctggcttattcttacgagtaggtaagatttcgccacggttgatccaaacttgaacaccaatttcaccataagtagtgaaggcatttacccaagcgtaatcaatatcagctctcaaagtttgtaatggaacacgaccttctgtgtgccattctcttcttgccatatcggcaccgttcaaacgacctgaagtttgaaccttaatacccttggcaccagcacgcatagctctttgagtagcttgacgcatagcacgtctgaaagcaatacgagcttcaagttgacgagcaatactatctgctactaacttagcatcaagatctggtttcttaatttcaacaatattaatgtgaacttgcttaccagttaaagcatttaattgttttctcaaagcttcaacttcagaaccacctttaccaattaccatacctggcttagcagtatgaattgaaatgttaattctgttagctgcacgttcaatttcaacagtagatactgaggcatccttcaacttttctgaaataaattttctgatttgaaggtcttcatttaaagtttctttgtatcccttgtcagcataccattttgattcccaatcacggataacaccgagacgaaaaccgtttgggttaatcttttgacccattaatatacctcccttaatcgttcttttctgaaactactacaactacgtgactggttctcttgttaattggagaagccatacccttagcacgtgggcggaatctcttcaaagttgcaccttcatttacgtaagcttctgatacgtaaaggtttgcactttcaagatcgtagttatgttctgcgttagcaatagctgaacgtaaaactttttcaacgattggggaagcagctctaggcgtaaattccaagattgctaatgcttcagcaacgctcttgccacgaattaagtcaacgactaaacgagcttttcttggagcgatgcgaacagttcttgcttcagccttagctgaactaatttgttctgccatttagatgtttctccttcctctaagcttgtgttgtggctttatcatcagtggatttgtgtccgtggaaagttcttgttggaacaaattcacctaacttatgaccaaccatgtcttcagttacatatactgggacatgctttctaccatcgtaaacagctatagtcaaacctacaaaggaagggaaaatagttgaacgacgtgaccaagtcttaataacttgcttcttatctgcatctgcttgtgcatcaaccttctttaacaatgatgcatcagcaaaaggaccttttttaatactacggctcattaattaaccctccttctactacttgctacctttacggtgacgaatgattaacttctcgctggccttcttggtatctctagtcttaataccacgtgccttcttaccccatggagtcataggttgaggacgaccaactggagccttaccttcaccaccaccatgtgggtgatcgttagggttcattacagaaccacgtgattgtggacgcttgcctaaccaacgcttacgaccagctttacctaattgaatcaatgagtgttgttcattaccaacagtaccgatagttgcacggcatgatgacaaaatcttacgaacttcaccactttgtaatcttactaaagtgtaatcaccatcagcacctaaaacttgagctgaagcaccagcacttcttacgagttggccacccttgcctggcattaattcgatattgtgaattgaagtaccagttgggatattctttaattccaaagcgttacctggcttaatgtcaactgaatcacctgattcaactacatcgccaacttttaagcccttaggagctaagatgtaagctttgataccatcagtgtagtgaagcaaagcaatgttagcagttctgtttggatcgtattcgatagcctttacaactgcctttgcgttgtccttgttacgcttaaagtcgatgatacggtatttttgtttgtgaccaccaccacggtgtcttacagtgatatgaccatatgagttacgacctgcagtatgtgattgagattcaagtaaagtcttttcaggctttgtcttagtgatctcagcaaagtcggaagaagtcatatgacgacgaccattcgtggttggcttgtaaatcttaatagccaattgactgacctcctattacttgttgtcttctgtgttatcgtcttggaaaatcttgatgtcgtttgaatcgttagttaaagtaacgatagcctttctacgacgagcggtcttaccagtgtaacgacctactcgcttgtccttgccgcgaacgttcataatgtttacgttcttaactttaacatcgaagatttcttcaacagcattgcgaacttgtgtcttggttgcagttaaaagcacgtcgaatgtgtacttcttatcatccattaagttcgtggacttttcagtaatgacaggtcttaaaatgatatcgcgtgcgtccattaagccaaaacctcctcgatcttcttaacagcatcttgatctaagatcaacttgccatagttaacagcatcttcaacgtttaagccattaactggaacaaccttaaccttagtcaagtttcttgcggaaagttgtacattgttatcatctgaaacaattaaaactttaccgtcagcatttaagccgtttaacattgatactaattccttagtcttaggagctgacatagtcaacttatctaaaacaattaaatcattgtcaatcaacttttgggaaagaactgacttaatagccaaacgacgttgctttcttggcatagtgtatgcgtatgaacgtggagttgggccaaagactgtaccaccaccgcgccattgtggagctctgatagaaccttgacgagcacgaccagtacccttttgtctccaaggcttcttaccaccgccgcgaacagcagatctattcttaacctttgaggtaccttgacgcttgccggctctttgtctaataattgcttcaaaaacgacactttcatttggttcaataccaaaaaccttatcgtttaaagtaacttcaccagagtctttaccgttttgatccataacttttaaattagccattctagtcctccttcctatttatcagcctttacagctttagaagcagtcttaacaacgattaatgagttcttagcacctgggacgttacccttaatcatcaatacgttcttgtctgcaacaactttttcaattactaagttttcaatggtaactttcttcacacccatgtgacctggcaagcgcttgccctttggtacacggttaatgatggaacccattgaaccaggaattctgtggtatcttgaaccgtgagtttctggtcctcttgattggccccaacgcttgatgttaccttggtatccatgacctcttgaagtaccagtaacgtttacaacgtcaccttccttaaatgtatccacagtaacttctgagccaacttcatagtccttaagctcaacaccgcggatttcccgaatgaagcgcttaggcgaagtctttgctttatcagcatgacctttttctggtttgttgctcaaaacttcacgcttgtcttggtaacctaattgaactgcttcgtaaccgtctgattcaacagtcttaacttgcataacaacgttaggagttgcttcaacaacagttacaggaacaaggacaccatctttagtaaagatttgagtcataccaacttttcttcctaagattcctttggtcatgtttacacctctttctatttaaattacagtttaatttcgatgtctacaccgcttggaagatcaagcttcattaatgaatcaacagtctttggtgttggattcaaaatatcgattaaacgcttgtgagtgcgcatttcgaattgttcacgtgagtccttgttcttgtgtggtgaacgaagaactgtgaataaagttctttctgttggaagaggaactggacctgaaatttcagcaccagttctctttgcagtagctacgatcttagcagctgattcatcgagaataccatgttcgtaagacttaagtctaatacgaattgtttgacttgccattaaattacctccttaacgtcttctttaaaagatgactcgctcggcaaaaattccccgcacgccactgtggcaatgcagcctggcgtgccgcaaccttttgcgtcaacgctttacaacgattttcacacttaagggcacactgtcccataagcacaaaaactattgtactttgtccctccttaaatatcaagggtttacgacttttttcttaaatttatttacaaaaaaagagttatcaaaataaaaatgcaatgtcattaagttaagacattgacaattaagggtgcttttttagagatcgaatcatttggattcgatctctttttttgtataaaataaaggcgaaaagaccagccttttcgcctatcttatatattatatattttaaaccttcaaaattattgccagaaagatggtgttaattatgaaagcccttcataagaatattctagaacgtcttgatcaaattatcaataatactggggatcatattcacgattttattaataatcctcatgcttttaccaggaaacgcactttagatgcagcgacagtccttaaaactacaattaacatgcaaggtcagaatttaaacagtgaactctttagagcttttggcgaagatgcaactaaaaagaacgataaagtagttagtacttctgcctatgttcaacgcaaaagccagctttctcctgcttgttttaaacatattctgactgtttttaatcaaaatctatttaatattcaactttttgatcatcactaccgtttgtttgccattgatggctctgactttaatcaaatctggaatccgaaatcgaataacattgtacaagcttcttctcataaaaagaaaccctattgtcaaattcacgttaatgccttatatgatctattgaataatacctaccaggattgtatttttcagcctaaatcagaaatggatgaacgcaaagcggctgttcaaatgcttaaagctttgaattgtggtccatatattgtaacaatggatcgtggctacactagtttcaatatgattgaaaactgcaatcgcctgcctaactgtcattacataatacgaactaaggctggacaaggcggagttaaagaaataacgacattgcctgatcaagaatgtgatcgtgagatttcctgcctggtaactacttctaactattactacatcacgcataaagccagtgagaatattcaccatgtccagcatcattatcgccaatatattaagtatcgctctaaaaatacccaggatctaagctgggattttggcgagttatgcacaataaaatttcgagcctgcaaatttagaattaatgatgccaaatcaggcaaagaagaatgggaagttgtgctaaccaatcttgatcgaaaaaattatccgctaaaaagaattaaagagctttatcatctgcgttggggtattgagacctccttcaagaaattgaagtattctttaggcagtgtacagttccattccaaacaagataaatttattgaaatggaaatttatgcccatatgattatgtttaatgcaatcagtcaaattgatgcacaggcctatattccgcaaaagcattgcaagtatcaatatgccatcaatttcaagcaatcatgcttgattattcagagcatgtatttggcttcttctttaacgcaagattttgaacggatccttattcagatcagctattataccattccaattagaccaggccgcaaggacaagagaaatattaagcccaaatcagctgtatattatttatatcgcgtagcttaaaaaagcagaatctgtgctatgccttatttgttgtacgaaaaaagcaccaatttaaccaattaaatgttaaatcagtgctttaaaagtctaatattaattgtcaatgtcttaacttaatgacattgaataaaaatgataactcttttttatatgaaattgttttcaattaagctaactgcattaatcagttcttaacggaagctattcagcatctccgccgcgcttcttaatgatgtcagcttgaattgatttaggtgttggtgagtagtgatcaaataccatagtaaatgtaccacgaccctgagttgatgaacgcaaagtagttgcgtaaccaaacatttctgaaagtggaacaaatgagttgatgatcttagcaccggctctgtcttccataccttccatggtaccacgacgagcagtgattgaacccataacatcacctaagtattcttctggagtagttacttgaaccttcataattggttccaagataactgcgccagcctttgaagcagcattcttcaaagcaagtgaagcagcaaccttgaaggcagcttctgatgagtcgacttcgtgataactaccatcgtaaagcttagccttaacgtcgatcaatgggtaacctgcaagaacaccattcttcatagcttcttgtaaaccttggtcaactgaaggaatgaattcacgaggaacaacaccaccaacgatggcatcttcgaattcgtaacccttaccttcttcgttaggagtaaagtcaatccaaacgtcaccgtattgacctttaccacctgattgacgaacaaacttaccttgtgccttagcttccttggtgaaggtttcacggtaagcaacttgtggttcaccaatcttagcatcaacgttaaattcacgtctcatacgttcaaccatgatgtcaaggtgaagttcacccatacctgaaatcaaggtttgaccagtttctgggttagtttcagcacggaaagttgggtcttcttcagtaagcttttgcaaagcaacgtccatcttatcacggtcagcctttgacttaggttcaactgatacttggataactggatctggaactttcaagctttccaaaataagtgggtgatctgggtcagttaatgagtcaccagtagtggtgttcttcaaaccgatagcaccagcgatgtcacctgagaatacttctggaatttcagtacgtgagttagcgtgcatttgaagcaaacgacctacacgttcacgtgaattctttgaagcgttcaatacgtatgaacctgattcaagagaaccggtgtaaacacggatgaaagtcaaacgacctacgaatgggtcagtagcaatcttaaatgcaagagctgcaaatggcttcttatcgtcagccataagttcaacttcatcaccagtcttaggattgtgagcaacgtaaggcttaacgtcaagtggtgatggcaagtagtcaataacaccgtcaagcatcatttgaacacccttgttcttgaaggctgagccagcgtaaactgggaagaacttcaagtccaaagtagctttacggatagctgcctttaattcatcgttagaaatttcttcaccgccaaggaatttttccatgatgccgtcatcaacatcggctacggcttcaattaagtcgttacgacgtgcttcagcttcttccttgtattcgtcaggaactggaacagtatcccacttagaaccaagcttatcttcgtcgtagatgtcggcaaccatgttgattaagtcgataacaccttcaaaagtgtcagctgaaccaattggcatttgaacagcatgggcattagcgtttaaacgttcgtgcaatgacttaactgacttatcgaagtcagcaccgatcttatccatcttgttaacgaaaacaatacgaggaacaccgtaagtttcagcttgacgccatacgttttcagtttgtggttcaacaccagcttgggcatcaagaacagttacggcaccatcaagaacacgaagtgaacgttctacttcgatagtgaagtcaacgtgtcctggggtgtcgatgatgttaattctgtggtctttccattgtgcagtagtagctgcagaagtaatggtgataccacgttccttttcttcatccatccagtccatttgtgaatcaccttcgtgagtttcaccaattttgtggatcttaccagtgtagtaaaggatacgttcagtagtagtagtcttacccgcatcgatgtgggccataataccgatgttacgtgtctttgctaatggaaattcacgcttgttagccataaattattctctccttaaattaaaacgaacaaattagaagcggtagtgtgcaaatgcacggttagcttcagccatacggtgaacatcttcacgcttcttaactgctgaaccagtgttgtttgaagcatcgataatttcgttagctaaacgttcatccatagtgtgttcgttacgtaaacgagcgtatgaaacaagccatcttaaacctaaagtagttcttctttcaggacgtacttcaactgggatttggtagtttgaaccaccgatacgacgagctctaacttccaaaactggcataacgttgttcatagcttcttcaaatacatcaagtggttccttaccagtcttgtcttgaacaatgttgaaagcatcgtaaaggattgaagatgccttagctctcttaccatcgaccattaagtggttgatcaacttagtaacaagctttgagttgtaaactggatctgctaaaacgtctctcttagttacgtgaccttttctaggcattatttaactcctcctttaatctttcttagtaccgtacttagaacggctttgctttctgccatcaacaccagcagtatcaagggcaccacgaacgatgtgataacgtacaccaggaaggtcctttacacgaccaccacggattaatacaactgagtgttcttgcaagttgtggccttcacctggaatgtaagcagtaacttcgatcaagtttgaaagacgaacacgagcgtacttacgtaaagctgagttaggcttctttggagtcatagtaccaacacgagttgcaacaccacgcatttgtggagctgggttgaatactgattccttcttcatactgttgtagctgtaattcaaagcaggtgactttgacttagtgacctttgaatgacggccttttcttaccaattgattaatggttggcattaatttttcctcctaaaatactattttgttcacacatccgggagtttcttttttactcacgaatagactgttcaaaacatacaaagactattgtactcggttttaagcagaaagcaaactttttcaaaataaaaaaagaaaaatcggctatttttgcgtaataaatagtggaggtgtttttttgaaatacttatttatttttactaactttataattggaagttgcttggcttctcacgcagcagtagtttacgagcactggaatgataaaaattttatttactcacgttctcagtgcaacaactgtcaccttgaattatcaattttggatgaaattccattattatcttatctttttcttcaaggaaaatgtcgttattgttatcaacaaattccagttgaattatttttatttgaattaattggcggctttgccttttgtttactcgattttagtaagacacaggacattattaccgctattttgcttttttcgcttttagtcgttgcaatctctgattatcaaaagcaagaatttgatcttctcctactaattccagccattagcgttgcgattttattcaaccaatttgcagcttttacattaatcgactggatctcttttacattattgctaggaatttttagctatagcataatgcaaagaaaaatggggctaggcgatttattaatttacttaattatcgcttgctacttcaccccatcatttgccaatttagtttttctatttgcttcaatcttggtaattgcaatttttcttattgaaaaaactcctattaaccatcgctatccatttattccatatattttcctaggattagtactaacccaattaattttttagacaaaaaaataagcattcccgctcttaaaagattggaaatgcttatttattttcaataaagcttagtcttgcttagctttatccttttctttcatttgcttttcaatatcagcaattgagtatactgaatctggcttcttaacgtcagcttcaggttccatgctgcggtatacaggcataccagtaccagctggaataattttaccaataataacgttttccttaagtccaagaagtggatcattcttacctctaatagatgcatcagtaagaacacgtgtggtttcctggaatgaagcagctgacaagaaactgttagtttccaaagcagccttagtaatacccaagataacgctttgagcagttgctggaataccaccagaaataataacttccttgttgcggtctctaaattgaccaatatccataacttcacctggcaagatgtcagtttcacctggatcaaggacacgaaccttttgcagcatttgacgagttaacacttcaacgtgcttgtcggcaatgtctacaccctgcattctataagccttttgaacttcagctaagatgtacttttcagtagttaatgtatcagtaacttgaatcaattccttaggatcaacagaaccaagagttaacttgtcaccacgatgaacgtagtcaccttcgctaacagcaactgaagctgtataaggaacactgtagcttctagtatcaatcttacccttaacagtaatttcacgagtatgttctgctgggttttcttgaattgaatcaattacaccatcaacttcagaaatggttgcacgacccttagggttacgtgcttcaaacaattcttgcacacgaggcaaaccttgagtgatatcttcagcaccggcaacaccaccgttgtggaaagttctcaaagtaagctgagtacctggttcaccaattgattgagcagcaacagtaccaactgcttcaccaacttcaacttcttcaccagtagcaaggttcataccgtaacacttgcgacatacgccgtgaggagtatcacaggtaagaattgaacgaatcttaacgtgagttacacctgcatcacaaatcttgtgtgccatgttttcatccatcatgacatctctgccgacaatagtttcgccagtttcaggatctttaacagtctcagcagtgaaacgaccaaccaaacggtcaaataatggttcgatcatttcgtcaccttccatgatggcactaactgtaataccacgatcagtaccacaatcgtcatcacgaataataacgtcctgagcaacatcaaccaaacgacgagtcaagtaacctgactgagcagtcttcaatgcagtatcagtcatacccttacgagcaccgtgagtagacatgaacaattccaatactgacaaaccttccttaaagtttgaagtaacaggaatttcgaacaaaccaccgttaggagtggccatcaaaccacgcataccggctaactgagtaaagttagaaatgttaccacgggcacctgagtctgccatgattgaaattggattacgaggtgcgtgaatttgtgcaatttcgttttggatcttgtccttacatgcattccaaatactaattactcggtcgtgacgttcttgttcagtaatcaaaccacgtctaaattgcttagaaacaacatcaacttgtttacgtgccttggctaccttttcatccttatcttggatttctggaacgtcagtcataccaatagtaatacctgaagtagttgagctaatgtagcctaacttcttcaaatcatccaagtattctgaagttctttgaaccttgtaatacttgtaaatagtagcaatagaatctgacaagaagcttcccttaaatggactagcgattaaatcatcgcctacttcatcgatcttcttatcaatctcttcgccttcacctaagaagtacttagcatccaacggattgttcaagttctcttcagttggttcattgatatagaagtaatcatctgggaacaattgattgaagacaatcttaccataagtggtaataaagatgccgtgttcatgtcccttaggccatggctttttaggcatagcatctgcagacataccaataatggtatggtagtgaatatcgccattttcgtaagctacagcagcttctgctggtgagctgaagatcataccttcaccttcacgaccgcgttcggcctgagttaaccagtagttacccaaaacgatatcctgtgatggagtaacaattggcttaccatccttaggagccaaaatgtggtgagcagccaacattaacaatcttgattcagcaacagcttcatcagaaagtggtacgtgaatagccatctggtcaccatcgaagtcggcattgtaggcttcacaagctaatgggtgaagtctaattgacttacctggtaccaagattggctcaaaggcttgaatactcaaacggtgaagagtaggtgcacggtttaaaagaactggacgttccttaatcacatcttcaagtacatcccagatatcgtcatcttcacggtcaatcttacgcttagcattcttgatgtttgatgcaattccacgtttaactaattcatgcattacaaatggcttgaacaattccaaagccattggacgtggcacaccacattgatagaatttcaattttggtgaaacatcgataactgaacgaccagagtagtcaacacgcttaccaagcaagttttgacggaaacgtccttgcttacccttaagcatatgtgaaagtgacttcaatggacggttacctggtccaacaactggacgaccacgacgaccgttatcaattaaagcatcaacagcttcttgaagcatacgcttttcgttttgaacaataatattaggtgcgttcaaatcaagcaatctcttcaaacggttgttacggttgattacacgtctgtacaaatcgttcaaatctgaagttgcaaaacggccaccttcaagttgaaccattggacgaagatctggtggaattactggaacggcatccattaccatccattcaggcttgttacctgaattcttgaaggcatccaagatatctaaccgtctaattgcacgcgtacgtttttgaccagtggcagtttgaagttctttcttcaaatccttaacttctttatcaaggtcaactttcttaagcaaatcgcgaacagcttcagcacccatcttagcttcaaaacggttaccgtacttagctttttgttcacggtattcagcttcagttaataattgcttaggttcaaggtcagtatcacctggatcaattacaatgtatgcagcaaagtaaataacttcttcaagtaatcttggagaaatgtccaaaactaatcccattcttgatgggatacccttaaagtaccaaatgtgagttacaggtgcagccaattcaatatgacccatacgttctcttcttacctttgaagaagtaacttcaacaccacaacggtcacaaacgataccacggtatctaacgcccttgtacttaccacaagcacatgaccaatcttttgttggtccaaaaattctctcatcaaataagccatctttttcaggctttaaagtacggtagttgatggtctctggctttttaacttcaccatatgaccagcttctgatcttgttaggtgatgcaagaccaatttgcatactttcaaacttatttacgtcgatcaaaagtttaacctcctactatttagaaactttatcgtcagactcatctgcaggagctaccggcttatctgcattttctttactgtctttatcttctgattttccagtttcttcggctaacttcttcttttcttgctcttctgccatccgtgacaaagtatcgatgttcaagtgttcacttgagtcttcatccatatcacgaagttcaatttcattatggttcatatcaagaacacggatatccaaacctaatgattgaagttccttaacaagaacacggaatgattctggaacacctggcttaggaatcttttcacccttaacaatagcttcatatgcctttacacgaccaacaacgtcatctgacttgtaagtcaaaatctcttgcaatgtgtaagcagcaccataagcttcaagggcccaaacttccatttcaccaaaacgctgaccaccaaattgtgctttaccaccaagtggttgttgagtaaccaatgagtaaggcccaattgaacgtgcgtggatcttgtcgtcaaccatgtgggtcaacttcaagtagtgcataacacctacagatacacggttgtggaatggttcaccggtacgaccatcataaacaacggtcttaccatctttatcaacacctgcttgacgaactgtgtcccaaacgtcattttcgtcagcaccatcaaatactggtgttgcaacgtgaatgcccaattgacgagcagctgcacctaagtgcaattcaagaagctgtccgatgttcatacgtgatggaacacccattgggtttaaacaaatatctactggagtaccatctggtaagtatggcatgtcttcttctggaacaactgcagcaacagtacccttgttaccgtgacgaccagacatcttgtccccaacttgaatctttctcttttgagcgatgtaaacacgaaccattgtgttaacacctggtgaaagttcatcgccggcttcacgagtataaaccttaacgtcttgaacaataccgccaccaccgtgtggtacacgaagtgaagtatcacgaacttcacgagctttttcaccgaaaatagcgtgaagtaatctttcttcagcagataattcagttacacccttaggagttaccttacctaccaaaatgtcgccatcgtggacttctgcaccaacacgaacgataccatcagcatcaagatccttcaaagcatcctcaccaatattaggaagttctctagtaatttcttctggacctaacttagtgtcacgagcttctgattcataatcttcaatactgattgaagtataaacatcatccttaactaatcgttcagaaagcatgatggcatcttcatagttgtacatgttccaagtcatgaaggcaatcaatgggttttgacctaaagcaagttcgccatgatccatagttggaccgttagcaattacatcactcttgtcaacctgatcacctaatttaacattaggagtttggttgtatgacttagagttatttgaacgacggtacttttcaagtgtgtatttgtccaaagtaccatcttcacgtctaatacggatttcattagcatcaacgtattcaactacaccagcagccttagcgattaaagcagcacctgaatcgtgtgcagcacggtattccataccagtaccaacaagtgaaccatgcggattaattaatggtgcagcctgacgttgctggttggcacccatcaaagcacggttagagtcatcgttttcaaggaatggaatacatgctgaagcgacagaaacaacttgcttaggaataacgtccatgtagtcaatcttatctggagaaacttcgacgttatcttccttttgacgagccaagatcaacttctccttaaatgaaccatcatcattcaatggagtgttggcaccagcgataatgtaattatcttcttcgtcagcagtcaaatagtcgatcttatcagtaaccttgtggtccttccaagaaacacgacggtatggggtttcgataaaaccatacttattaataatcgcatatgaagcaagtgagttgatcaacccaatgttaggaccttctggagtttcgataggacacaaacgaccatagtgagtatagtgaacgtcacgaacttcataaccagcacggtcacgggtcaaaccaccaggccctaaggctgacatacgacgtttatgagtcaattcacctaatgggttatgttgatccataaactgtgaaagttgtgatgaaccaaagaattccttaatacttgcaacaattgggcgaatgttgatcaattgttgtggagtaactgttgaaggatcttggattgacattctttcacgaacaacacgttccatacgtgccaaaccaattctaaattggttttgaagaagttcaccaacacgacgaatacgacggttacccaagtggtcgatatcatcagtagtaccaatttcatcttgcaatgcaaagaagtaattgattgaagctaaaacatcagctggagtcaaatgcttaacgttatcagcaatatgaccatttgacattaatttaacttcacgttcagggtctacctttgagtaaaccttaatttcttgaactgtaataggatctggtaatacgccttcctttgaaggttggtaagttaccatcttaaagtcatcacgatcaaggtatggagctaacttatccattacttcgtgggtaactacagtacccttcttagcaacaatttccccagtatctggatcagctaaagtttcagctaaagtttgaccgtataaacggttcttaagtgaaagcttcttattgatcttgtaacgacctacaggtgctaaatcgtaacgacgtggatcaaagaaacgggcatacaaaagtgaacgtgaagaatcagtagtctttggttcacctggacgaagtctttcatagatatcctttaaggcttcagctacacgtgagtcagctaggttcttatgaacatccttgtccaaagtgaattgcaaagtatcactttgaccaaacatatcaataatgtcactgtcagagccaatacccattgctctaatcaatacagtaagaggcaatttacgagtacggtctacacgaacaaatgaaacgttctttgcgtcggtttcatattcaagccaagcaccacggttaggaataacagtagtaccaaagatttgacgaccattcttgtcataatcgccagtgtaatatacaccaggtgatcttaccaattgtgaaacgataactctttcagcaccgttaacaataaatgaacctgattcggtcattaatggcaaatcaccaaagaaaacatcttgagtcttaatttcaccagtttcttggttagtcaatttcaaggtaacgtgcattggtgcagcataagttgcatcatggttacgggcttcatcaactgtatactttggcttttgcaatttatagccaacatattctaatgaaagcttacctgagaaatcgctaatcggcataatgtcatcaaagacttctttaatgcctttatcaagaaaccacttatatgattcggtttgaacatcagttaagttaggtaacttcaatacttccttaatgcgggagaagctacgtctagttcgatgtttaccgtagttcactacgtgtccatttaacaaggaaaaacatcctttctgtctaagaaagcaaatattacatttctgttacaaattcaaaaaactgcaattttaggcataaaaaagacaaaaacaacaattgtcgtttttgtcccttatcattttgctggacaatagatcagcaaaatcctgaatctcagtctttttaaatcagcaaaaattatatgatattttcagcattttgtcaaggtatagcaccaatatcacttgacttttacagtttcttttttcggattaactacttcaaattttaaatgtccatgctgactaccaattttcaaagtgtcgcctgacttaacttcgcctacaatcagcatctcggcaatcttgtcttcaatatcattttgaattgctcttctcaatggtcgagcaccattttctggatcataaccatcttgtgcaatctgatccagtgctgcccgtgatagcttcaattcgatacccttcttttgcaaacgaactaccagcttgtgcgttaacaaagttacaatattgcgcagctgcttcttatctagttcatcgaagataatagtttcatcgattctgtttaaaaattctgggcggaagaattgtttgattgcttgttcaactttagctgatctcgccttggctggatctgcattatctgcattgaagccgactgccttattatcaaagagcgaacgagaacctaaattagaagtcatgattataattgtatttctaaagtcgacttttctacctttggagtcagtcaaaaatccttcatctaaaacctgcaaaagcaagttaaagacatctggatgagctttttctacttcgtcaagcaaaataaccgagtacggatgacgacgaaccttttcagataattgaccgccttcttcataaccgacatagcctggtgccgagccaattaatttgcttgaagcaatttggtccatatattcagacatatctagcctaatcaaattgtcttccgagccaaacattgctgctgcaactgacttagctagttctgtcttaccaacaccagttggacctaggaacaagaaggaaccaatcggacgacgttcatctttaatcccgcttctactacgacgaatagcacgggcaactgctgaaacagccttatcttgcccaataacacgttggtgtaaaatcttttccaggttagctagctgccgtgattcattgcgttccatctgggtaacagggacgccagtccagttggaaactactttagcgatatcttctggctcaaccacagctttagcactaactttgtcttctaacttctctaccattgcttcacgttgcatttctaagttgttctgctcatcctgcaattgagcagctttaacaaagttttgactagcggcagccatattcttttgcgtaatcagtttcttaatttgctcattaactttttctagctcagcatcattgctaatgttattacgaatcttaactgcggcactagcttcatctactaagtcaatcgccttatctggcaaaaagcgatccgaaatatagcgcgttgacaaatcaactgcatccttcaagctctcatcagaaatagtcacatgatggaacttttcatatttcgacttcaagccacgcataattgtcaaagtgtcatctcttgaaggctcacttaagcgcacttgttgaaaacgacgtgccaaagcttgatctttttcaatgtacttttgatattcattaaaagtagttgcaccaatcatttgaatatcgccacgagcaagcgaaggcttcaagatattagaagcatcaattgcaccttcagcaccaccagcaccaattaaagtatgcatttcatcaacaaagagaatgacattgccatccttggtgacttcgttcaggattttcttcattctgtcttcaaactcaccacgatacttagtcccagcaactaaactacctaaatttaaggccattacccgtttcttaagcatatcctgtggcacttttttgttgacaatctcagttgcaatcgcttcagcaacagcagtcttaccaactcctggttcaccaactaagacaggattattcttagtccgtcgagacaaaatttgaatcacacgcttaatttcttggtcacggccaatcaccggatcaatctcgccattacgcacacgttgatttaaattaaccgctaccttatctaagttaggagtagtgctcttgcgcttcttttgaccagtcgtcgtgttatcatcacccagccaattagctgaatcaccaaagtcttggtcttgactcaaactgtcttcaacatcctgctgcagacgaggaatatcaacattcaagtttttcaaaatcattgctgataaaacctgctcacttgcagtaattcccagcaaaacatgattagtgttaacttccttaactccatcgtcattagctcgtcttctagcataatccaaagctaaactcaaacgtggtgacatttccatgtagcttgccttaggggcagagccataacctgtataacgttcaatttcttcacgtactgcagttggtgttaatccccatgaacgcaagatttttcctgcttcaccgtcagtttcaattactagagccaataaaacatgttctgtgccaatcaagcgatgatgaaaattttgtgcttgttcacgtgcaattttcaatacttgattaacgctcttactatatgaattttccatacaaacaccaccctttaaaatacgttatggtattttacttttcttttgtcagtaagtaaaacaatttgacttatcttcaacttcattatgtccaattctaataattacgcaaaaattgctttcgctatttcagttaaatactttttatcaatttcgtcaaaattagctagcttggtgtaagtgtcaatgtttttgcggtagcctttaaaccattagtctaaccttaatttcttaaatatttatatgacttaaatttctgcttagcttgcttaaataactattgccagctacctgtgcggttaatgcgccatgctggatgcctaaatgaacttcatgacgcttctttaagctgtcacgggccgctgcttttaattcctgttcagtcaatacagttatttctgaatcttcaaactcgctgctaagccaaaattccagctctcgattcttgatgcagcttaagatcctaagcatgccttctgctccagattttgaccatttcttgccttgccccttaacacggtaggtatacttgcggtggttgctctcgcagcagccaatggctttagtcacagtcagttttcgtttcttaaacggcttaatatcgtcccaatgacgatcaatataattccttaggcgccccagataatcatgattgagctcggtattcaattcatcaattagtcggctttctgcagtggttaggatagttttaactttgtcatagctgtatttgtattccaaagcagaaatcagcttgccttgcaggtcaggcgcaaaatatagcctttctttgattttcttatttaggtgaaagacatccaagaaatgctcatgacgcttgcatagccctacaatgtcatcgaagtctgttttggcatatccagcaccgccatcggcgttgctaagaattacagtatcagaaagatcataagtattggccaggtactccttggcttcgttcagcgcatcaagtcggcttaaagaaacaaattccttggcattgattcgctttctgcgtttcttgcttatattgacaatgccttcacagacctgatagcgatgaaattccaaccggcttttagtgcctttgatcaccacgccatcgccttcaagatacaaaactgggacctttttcttagtgcctgcggcatcatatcttgaatctgcttcttggcccgctttaatatttttcccggccatttttaccaaattgcccacctgcatatggctaatattaaagccagacaggcaattgactgctagagcagtattgcgataagtggcaacgctgcttacttctaagatgtttttgactgctaaaatactgtagcgcttgtatttgtaaaagcccattaattcatccaagggataccttgcttgtttgcctgggcagacatatcttcttctgacatacctaacttcgccaaaagccatattgattgagcgctcattcttcttatcaatctgatagccctgtgctttaaccttggtaatcatttcatcatcaactttagctaaagccaaggccatgatttccttaatcaggtttaagaagaaacagattatttttctttcacgcttaatataattatcttcagactttataatatttgcgatttcagttacaattgaattcataaaagaccagcttctaatgtgttttttgttcttaacatcagactactggtctttttgtttgagctcaagtccaaattcaaaggacttgggcttttttaattatttattcaacttaccgtaaaaaattatacgcttagtagcttggtcgaatcaaaatcaaagacgccccaaagttttccctgattaaaaattgggacaacgatttccgaatttgaagcactatcacaagcaatgtgaccagcaaattcatgtacatccttaacaatctgcgttgtttttgcttgtgcagccgtaccacaaacaccttttcccatttgaatatgaacacatgctggcatcccctgaaatggacctaatatcagttcatcattttcatagcgataaacacctgcaaaattcacatcatttaacgaattaaacaaaagagcagataaattagctgtattagcaatccaatcatcttctccctcaatcaaagctctagcttgctccactaataatttgtatttttcttcagtagttgccgtcatttttaatctccctttaagttttaaaagatattataacaaaaagaaaaaagctacccaaacggatagcttgtatatcgggaaaatcggacttgaaccggcgacctctacgtcccgaacgtagcgctctaccaaactgagctatttcccgtaaaaaaagactcaccacttggtgagccttctatcttggagcggaagacgggattcgaacccgcgacccccaccatggcaaggtgatgttctaccactgaactacttccgcaacaacagatattattatagcaaatacatttttctttgcaagacctttttatcaaaaaagataaatttattttaggcacaaaaaagctcacattcgtgagctcttcatcttggagcggaagacgggattcgaacccgcgacccccaccatggcaaggtgatgttctaccactgaactacttccgcgacaacagatattattatagcaaatacatttttctttgcaagacctttttatcaaaaaagataaatttattttaggcacaaaaaaagctcacattcgtgagctcttcatcttggagcggaagacgggattcgaacccgcgacccccaccatggcaaggtgatgttctaccactgaactacttccgcgatacaaaaattattatagcaaagattattctctttgcaaatactttttgaaaaaatattacttatctgtttttaactaagttaattttagttattgtaccgaattaaaaaaattgctataatatcttcaatttaattaaaggagatttcacatgagattacgtactattgctttctaaatcaaaatcttaatattaggaagcgagaaaaacatgccaaaatttaatatcagagaatatcaaccaaacgattatgctgaagtatgtcgcattcacgacgttagtcgtaaagaagagctaacaattggtggtgcggaaaaatacttcatacctttagagacagctccatataaggatgattttttctcctgcaaaatttatgtagcttatgatgctgacagcatattgggcttcgttgcagttcatccccaagaactggattacatttatgtagatccaattcatcaaaataaaggtatcgggtatgctttagcaacgacagctttgagatacatgagtcgaccagttagtcttgatgtatttgcagaaaatactaaggccaaaaagctttacaaaaaattaggctttaagtgtcaagaagttagatatcagcaatgggatttaaatgatcctaaaaaatactctgatgaaaaaatgattctcaattaaaaaatatataaacacaaactcttatccatgcttaaaacatagataagagttttttaatttataagattacttattttctttattcttcttttccatatcagccttaacttcagcttctacgctttcaacacgttctggacgcattgttgggaacaaaagaacatcacgaatagctggagcatcagtcaaaagcattaccaaacggtcaataccgatacccaaaccacctgtaggtggcataccgtattccatagcacgaaggtaatcttcatcgatcatgtcagcttcgtcgttacctgcttcacgttcttccatttgagcttcgaaacgttcacgttggtcgtcaggatcgttcaattctgagaaggcgttaccgtattcttcacccatgatgtaaatttcgaaacgatcagtaaatcttggatcgtcagcattcttcttagcaagtggtgagatttctactgggtgaccgtaaacgaaggttgggtcaacaatagtttcttcacagtacttttcaaagaaggcgttaataatgtgaccaactttccagaacttttcaacgtggatgtcgtggtcttccgcaatcttagttgcttcttcaagagtcattggcttccagaagtcaacgccagtcttttccttgatcaagtcaaccatgtgaacgcgacggaatggcttgcctaagtcaatgtcagtaccttggtaagtgatcttaccgtcatctgaaacaaccttagctgcagcacggataataccttcagcttcatccataacatcatggtagtcccagtatgctgcgtaactttcaagttcagtaaattctgggttgtggtgagtgtccaaaccttcgtttctgaatacacggccgatttcgtaaacacgttccatatcaccaacaatcaaacgcttaagtggaagttccaaagcaattctcatgtaaaggttaatatccaaagcgttgtggtgagtaataaatggacgagcttcagcaccaccaggaatgttgtgaagtactggagtttcaacctccaagaagttttgactatttaagtagtcacgaatagcttgaatgatttgggtacggtgaacaaaacgcatgtaactatcatggttggtaatcaaatcaaggtaacgttgacgataaattgcctcaacgtcctttaaaccatggtacttatctggtaatggacgaagagcctttgataagaaagttacgtgaagggctctaatagtaagctctccagtatcagtcttcataacttcaccctcaatacctaagaaatcaccaatatcagatttcttaaagatcttgtagttatcttcgccaacaatatccttacgtacatagatttgaatcttaccagtacggtcgtaaagatcagcaaaaccaaccttacccttaccacgctttgcaagcatacgacctgcaatcttggtcttaggcatatcagcgtttaattcttctttatcttcgttgccatacttttcttctaaagtacttgccaaatcttgacgatcaaattttctttgaccaaatggttcaattccgttttcacgtaattcttccatcttctggcgacgaactattaattggtcattcatttcattctttgccaatttacttttcctccatttatttgttcattgtcgcgcgtcgtgcagcacgagcttcttctcttttttcatactcgtcaacaaaattatcaagcaaatcatatacttcttgacgcgtccagacctcatttattttagcacgagtacgggctgaacggggaattccctttaaataatacgcggcttgctgacgaaattctggtacagcacgcttttcaccgtgaattttaacaagtgcgtgaagctgatgtttagccgtttcaaccttctcacgaacagtttgcggcttcaatttttcaccagtttccagatagtgtaccatatctttcaaaatccaagggttacctaaagcagcgcgaccaaccattactgcagtacaaccgatctcatccaatgcttttttagctaattcgggtgttctaatatcaccattagccacaaaaggcacatctagcacctgggcaacatcatgtaatacttcccagtcagcttcaccttgatacatttgtttacgtgttctaccatgcatcgcaatcatgcttgcgcctgcttcttgagcagctaaagcattttctacagcaaaaatatgctttttatcccagcctgttctcattttaacagaaaccggctttttaacgttctgcactactgcgtgaaccatctgataaatcttgtttgaatcaagtagccacttcgaacctgcatcagtctttgttactttaggtacaggacaacccatattaatatcaataatatccgcatcggtatgttgatcaatatattgagcagcttgaagcaaagtttcctcgcttccgccaaagatttgaatgctcattgggtgttcacgcggatcaacatccatcatacttaatgtctttttatttccataaatgatcccatgatcagaaatcatttcgcagacaaccagccccgctccgaattccttacagacaacgcggaatgcagagtttgaaactcccgccatcggcgcaacaacaactcggtttggaatggtgatatcgcgaattttccagctgttattcaccaaatcatcctttcaaaattaccctattatgatatcaaaaaagccccgctggttaaaaccttagggctttatttgccttaataatctttatctttgttctttttagctaaaatatctttcaattcatcttctgaataatgatacttgttaccgcagaaattgcaagtaagttcggcaccatgatcttcattaatcattgctttcaattgatcgctcttcaaagtttccaaaataccagcatacttttctttagaacaatcacagttaaaggctacatcatctttttcaagaatcttacaatcggttcctaagattttacgtgctaagtcttctggtgtcattccatccaaaaatgaagttgagagtgctggcaatgcatcaattcgcttaatcgtttcatcgatcaaagcatcactagcaccaggaagtgcttgcaacataaagccaccagcttcaccgattgaattatttggattaacaaatactgacaaaccaacagctgacggaatttgttctgacttagtcaaatagtaagcaaaatcttcagcaatttcaccagaaacaattggtacctgacctgtgtatggttccttcaagccaaggtccttagttacttcaaaccatccttgtccaacagcttttttcacatcaatatgaccatttttcttaggtggtaaagcaatatgtggattcttaacataaccctttaccttcaaatcggaggtagctgtcacgatggttggaccaacagggccattgcctaataaacggactgtcaattcttccttatctgtcaattctgcaccagcaagtaaaagagatcctactaaagtacgaccaagcacagcagctgaagctgaccacaagtcatgccgcttttgtgcttcactcactacacccttagcggtaatggttaacaagcgtaagtttttagtcttatcaattgactttactaaataatcactcatttttatccttcttttctaaaaaaatagagcctgtgacaggccctacttttatttaattgtctttatgctcatcatctgcaggagtatcttgagttgaagtttcattttctgattgatccttttcgggattctcaggattattttcttcaacttcatgattcttttcagatggagtctccaaggtatctttttcttgatcagctaatgcttgatctgaatcctttttttctgccttttcaacttcgcgcttctctgcagcagccttagcttcttcataagttgaagcctttgattcactcggatattcatcttcgtctttttcaggcatcttaccagtcttatacaaggccataatttgcttttcattcaaggtttcatacttgagcaaagcttcggcaatgattctatgcttttctttgttgtccttaacgatctcaagggccttagcatgagcttcatccaaaatcttctttacagcttcatcaattttagctgaagttgcttcactatatggcttaaagccgtaaggattgctttcgccttccttttcaagctcaaccatacctaaggattcggtcataccatagttaactaccatgctatgcgcaatttgagtagcttgttcaaagtcgttagaagcaccagttgacttatcaccaatggttgcttcttcacctgcacgaccacccatcaaaccaacaatttgttcaaataattgctttttagtcaaaatgaattgatcatctttaggcaacatgatgttataaccaccagcacggccacgaggtacgatagtaactttacgtacagtacgtgagtcgcttaagaccaaaccacagattgagtgaccagcttcgtggaaagcaacacgtcttctttctttttcagaaatcaaacgatccttcttagctggaccggcaatcacacggtcttcggcttcatcaatatctgatgcagtaatctcagtaccattacgacgagcagcaactaatgcggcttcattcaagacgttagccaaatctgcacctacaaagccaggagtttgacgggcaacttccttcaaatcaacatcaggtgcaagcggcttgttcttagcgtgaacctttaaaatagcttcacgaccacgaacgtcaggacgacctaccaataccttacggtcaaaacgaccaggacgaagcaaagctgggtctaagacgtctgaacggttagtagcagcaatgacaataacaccttcatcgccttcaaaaccatccatttcaaccaataattggttcaaagtctgttcacgttcatcattaccaccgccggtgccattgccacgacgacgaccaatggcatcaatttcatcgataaagataatacttggtgcatttttcttggcattgttaaacaggtcacgtacacgactagcaccaacaccgacaaacatttcaacgaagtctgaacctgagattgaataaaatggcacgttagcttcaccagctacagcacgagcaagtaaagtcttaccagtaccgggaggaccctcaagtaaaacaccagatgggattcttgcacccaacttagtgtacttagatggatctttcaaaaattcaactacttcgactaattcttgtttttcttcttcttcaccggctacgtcagagaaacgaaccttattcttagaaggatcttctggcttgacgtgtgaacgaccgaaattcattattccgccgccaccaccacgtccagcgccaccttggttcatcatcatccaaagcatgacgataaacaaaacggttggcacaagcatgacaatggtcgaaatccaattgccagattgtgattctccttgagttgtcatccgagcattacttttttgtgccaagttttgcacgttagaaacggtagaatcattctgtaacatggtagtagagaagcgcgaaacttttctacttgaattattactaaagaaatcaaaactattatttgattgattctttgttgtttgtgcagtcttgtaactacctgaaacagtgtaaacaccattagcaggttgaacactaaagtttttaactttgccttgacgcaaatctttaacaaattgtgagtaactgatattctctgagctaccactattgttagagccgccgagtgcccagttgattccccataggagcagaaggaacacaactatatagaaaaggccgtttgaaagtagccgattccggttattcttcataaaaaacctccgcaaagtctttaagttatacgtttaaaattctatcacaaattagcttgcaaccactaacattttcacctattttgaagacttcttaataaatgtataggaaataatgtttaccatctgtgataaagtcctgtttttgataacatttttctacaaaaacaggttcattttcagcataaattgtaatgcagcaagagcgcaaggcaaagggaattgccttttctgaaaatttctttttcgccttaactcgttgaccatttttcaacaataatttgctagcaggtactagacttcccgcagtaaaatgtgcatccctttccagccaaaagcttcctatttctttcaaatcagcttgcctatcagtagttagtaaataataagctccgttgaattcaaattgctgatttagttcgatactaaatggctgcacaattttctgtggcttattttcaactaaataactataaccttgataatcaatcacctcaaaattgcccaaattttcatttacccggcgatgatatttttgccagattatcttttgccaaaaaatatttttttcttctgtagataaatcatttaagttgtccgttttaattcgccaagcacccaaaaatggctcaaccgttctcatactattcaactgctcatccgccaaatccgtcaattgactcattttttcactaaaacgcagtgcattactaattaaattaggattctcctcttttaataatggcaccacatgatgacgcagtcgatttcgaacagtctcatcctccgtattagttgaatctattacatagtcaatttcacgctcttgatcatattcgagtaattcttgcttactataggctaatagtggtctaagcaaaacaacgccatgcatagagccgatatcttgcaaactattcatctcttcaggatttcccgagcgaataaatttgagcaaaatattttctagcaaatcatcaccatgatgcgcagttaataaatagttcattcgctcgctatgagcaacattagtcaaaaaatgatatcgtgcctctcgcgccgctgcctcaattcccgtttggggctgatcatgtttatcccacttgccattaaacaggcaaatcttcttttgagcacaataattttgcaaaacttctacttcatatgagctatccgcacgcaattgatgatcaaaatgtgccgcaaaaacagtaaaacttagttgtttttgcaaattaactagcatatctagtaaagccatggaatccggtcccgcacttgcggctactaatagtcttttatcctttaagtcaatctgatgttgttcaaaaaaatcattaattttcattatttttctaacaaaaaatggccctttcggaccatctcttaattctcagttaatacttgctttagcttttcaatttcttctttagcatcccgcgttgtttgattcaggacttgatcaaaatcagctggctttgtcttagaaaattgattatcatggtcaactaattccggatcattcactcgagtgatcgataaattaaatctccctttatggatgtgcaccacaaccacgcgcacttcatcgccagcatgataacgacgacgttcgcgtagccaattattgccaaagtcactatgatgaaccaaaccagaatgccgattaggtaaagtaacaaagatgcccaagtcagtaatgttattaattacaccagtcacccgattaccagcttgatacttttccattagttatcatcatttctttcatgcacgttataaatcttctcatttgatttagaataatagaatttataacgaatcagcttagcaacataatttggatccttcaaatcctgcttttcagtttctaagtcatttctcttattttttactttagttaaagtctgtttttcagcttgtacttgattattcagtcgtccagtttgagaaatcttgattgcaatctgtacacctaaagcaacgaaaatgatagcaaaaactgccataattacgttcaaccgcttgcggtgtgtttctttctctaatttagcctgtttacgtctaagacgcgccctctgctcttctggactcaacgaattatatatacgtggaccatgattcattgtttaatcccctaattactaaataactatactaagtcaagtataacaacgatttaatcaaaagtcattaatcaactagctcgtacagttcacttgcttctgcttttttcgtggtctcgcgaatatttaacaccttagccttgatggttttggcgccgtaacctacttcaataatatcatcaatttttacatcgtagcttgattttacaactcgaccattgactttgattctaccttgatcagccatttctttagctacggttcttctcttaactaatcgtgaaacttttaaaaatttatcaatcctcatatttttctcctacagttacctttgtacaatgtcgcttgctgcctgtaaaaagattgccagttcattgaataaaacacgattcttcattttatccggcaacaatagcaagacaaccattcttttttcttgattcatactaatgcgagcctttaagcttacatgctccaatgccttaaaaatattaggtccctcaagttcgcgtgaagctgcattcgtaaattccactttaatcttatcgtcagttttaaccacattgagcacttgagccatgtcagcatcaacctttagaccggcaacagctaataaattctcgacggccgttggatagtcaccaaaacgatcgattaattcatcttcaattttacctaattcttcctgacttgagacggctttaatctttttgtaaaattcaattttttcttcttgatcaccgatatacgaatctggaatataagcctcaagtccaaggtcgatttctgcgtttgactttttgactgttgtcttccccttacggtcttgaattgcatcagccagcatttgtgagtacaaatcataaccaacgctatcaataaagccgtgctgttgtgcacccagcatatttccagcaccacgaattgataagtcacgcattgctattttgaaaccagaacccagttcagtgaagtcacggatcgcatcaagccgtttttcaccaacctcagttaaaactttatttggcttatacaagaagtaagcataagccaaacgagcactacggccaattctaccccgcaattgatacaactgacttagaccatagtggtcagcatcttcaatgatcattgtattgacattgggcatatcaattcctgtttcaataatcgtagtcgtaaccaagatatcaaactcgcgattcaggaagcgataaagaatatcttccaactgattctgactcattcgaccatgggcagctgcaattcgcgcctgtggcatcaattcctgcagtttttcgacagtttcatcgatatcactaatccgattatgtaaataaaagacctgtccatcacgttgcatttcacgcaagcatgcatcccttactacactaggaatttgttccatcacataagtttgaatagggtatctgttttgaggtggcgtttccattactgagagatcacgcacacctaccattgacatatgaagcgttcgcggtattggcgtagctgttaatgtcaaaacatcaatatttgccttcaactgctttaacttttccttgtgcttaacgccaaaccgctgctcctcgtcaacaattaacaatcctagattcttgaattttacatcttgagacaaaatacggtgagtcccaacaaccaaatctatcttgccattttttagtccttcaataatttcctttgattcaactggcgtttgaaaacgagatagcatagcagtattgactgggaaatctttgaagcgatcttgaatcgtctcatagtgttgttgcgccaaaatagtggtgggtactaaaaaggctacttgtttattatcctgaattgccttaaaagctgctcgtaaggctacctcagtttttccaaaaccaacatcccctactaaaagacggtccattggcttcgagctttccatatcttgcttaatttctttaaccgatcgcaattgatcaggtgtttctggataaggaaaggcatcttcaaattgtttttgtagatcatcatcaggtgaaaaagcaaagcctttttctgattcacgtttggcataaagttcaatcaaatcatccgcaatatcttcaactttagattgaaccttacgcttggttttagcccactcactaccacctagcttattaatatgtggtgtcttaccttctgaaccaacgtatttttgtactaagcttaattgatctgctggtacaaaaagctgatcaccatgctggtaggtaatcgtaatatagtcacgcttggtaccattattttctaaagtcttgattccttcaaaccgaccaatcccgtggttaacatgaacaacataatcccctggcttcagttcagtataattgcgcaaacgctgggcattctccagtgtcttaattctttttttacgttgtgggcgcttattaaatagttcacgctccgttagatataccaatttaactgttggtaaactaaagccactaacaaagccatcaactacaatttgtgtccgttgttcaacaatttcgtctgcaccaacaattggtaaatttaagccaaaatcaaccattgtttgatcaatttgctgtgctcttttttcattatcagcctgtaaaatgacggtttgccccgccttttgataagattctaattctgacttaatcagcggcatttgactaaagaattgttctggctcacgtgttgaccaattgagcatctggcctaagcgcagtcgtcccatgcttcgttgaaacaatgagaaataaatacgatggtgcttatctttgctcagaatctttgtataatctgaccgcaagctttgccctggcaacattgcaccagtttttagttcatcattaataaaagcagcgttttgcttatcaactgtttcaaccgcttgattaattaaaggcaaatcgtcaaataaaatctgcccatttttaggcaaatattcgagtaaactactagaaatttcaagcaaatagtcaattaagaaagcatagtttttaggtaaaccgccatcgtttaattcatcaagaactgccgcaaagtggtccttgacagctttagcgggagctggtgcactggccatatcttgttcaattttcttagccgctgccgcaattgcatccttagtaaaaactcgatcttgagctgctgcaacttctactttgtctaactctttttgactccgttgactagctaaatcgaattccttaattgtatctatttcgtcaccaaagaattcgattcgcacgggattttctcgatctagtggataaacatctaaaatatcaccacggatggcgaattcgcctggccgtgctaccaaagaatcacgctgataccctgaagcaagcaaccattcattgagttcttttagttcatattcttgacctggctcaaaactccgctttgcctgcgcaaaatcagttggattggtcagtttgtattgcagcccctgcggcgttgttaccactattcctgccttaccacttaacaaaaaattaagtgcctgaattcggctgctcagttcatcaggcgaactaactgccgtttgcgttgcaattgtagcatctactggaaaaatttgcacagtttcatctgccataatggcactgagttcaccatataagttttgtgctttactttcgttttcttcaattaaaataagtggagctgctaatttagttgttatctgttttagcaatagactaaaagcaccggcattagcgccagtgattagtgaattttttacttgttttgtttttgaaataaaattatttaaatcttgatctttatctaaaatctctgttaaacgcattttaattatatttattcattaaatattgactaccatgtccgctgataaagtcgtcaataatatctacacttatcgcaaatgcatcatccatcaatttttgttgttcatcattaaatggtgtcaaaacccatgaaacaaccgttgcatttttcggatgacgaataccaatcttcaaacgattaaacttttccgtccctaaatctcgaatgatgcttttaattccattatgtccaccagatttgccattagctctaattctaattttaccaattggcatatccatatcatcttgaataattagcacatctgctggatcaaccttaaagaagttagccacttgactaactgaacgacctgattcattcataaaggtttgcggctcaagcaaaattacatcttcaccatttattttttgcttagtccaatgaccttcaaatttatctttatccagtgacaaacccttttcattcaaataatgatccattgtcatgaaaccagtattatgctttgttttatcatatttttgtcctggattacctaaacctgcaattatcttcattatttttactcctcactatgcacacaatcttacatataatagcacaattaggaaataataattttattaatgcttgctatcatggtataattcattttgttaaaaatatcactaataaaaaaggagatttttatttatgccaagagatgaaagacctcgtaaagttattcttgttggtgatggtgctgtaggttcaaccttcgcattctcaatggtacaacaaggtatcgccgaagaattgggtattattgatatcgctaaggaacacgttgaaggtgacgcaattgacttagctgatgctaccccttggacttcaccaaagaatatctatgcagctgactaccctgactgtaaggatgcagacttagtagttatcactgctggtgctccacaaaagccaggcgaaactcgtcttgaccttgttaacaagaacttgaagattttatcatcaatcgttgaaccagttgttgaatcaggctttgaaggtattttcttagttgttgctaacccagttgatattttaacccacgcaacttggaaaatgtcaggtttccctaaggatcgtgttatcggttcaggtacttcacttgatactggtcgtcttcaaaaggttatcggtgaaatggaacatgttgacccacgttcagttaatgcttacatgcttggtgaacacggtgatactgaattcccagcatggagctacaacaatgttggtggcgtaaaggttagtgactgggttaaggctcacggtatggatgaatctaagcttgaagacatccacaaggaagttgctaacatggcttacgaaataattaacaagaagggtgctactttctacggaatcggtactgcttcagcaatgatcgctaaggctatcttgaacgatgaacaccgtgtacttccactttcagttcctatggacggtcaatatggcttacatgacattcacattggtactcctgcagttgttggccgtaagggtcttgaacaaatcattgaaatgccattaagtgacaaggaacaagaattgatgactgcttctgcagatcaattgaagaaggttatggacaaggcatttaaggaaactggcgttaaggttcgtcaataatctaaaacttgtttcacttaaaagcatctcttttttcggagatgcttttttatttgtctaactattgttaaaatatagttgttacttcagatgaactttaattaatatttaattaactcatcaactatgctataattacttgaaacatttctcactttcgagactgtaaaatagtttgtgtaaggatgaatgattccttaaatttatttctttaaacattagaaaaaggagttcctttcttgtatgattggtttgaacaaaaaaacacatacagaaagaagaactccttcatgaatgattttaccaaagattttgctcaagctctattcaatccagacaaaataaatgatttattgcgcaaagagctacaacaggctgttaataacttgctagaagctgagttgactgcctttctaggctatgatccctatgccagaaatggctggaatactggcaattctagaaatggtgcttatttccgcaaggttgatacccagtttggaccaattgaagtgcaagtgcctcgagaccgcaacggtcagtttcatcagcacacgctgcctgactacaagcagcactctgatgttttggaaagcacgattatcaagctctactccaaaggcgtaactaccagagaaatcgctgacttgattgagaaaatgtatggcagtcattatagtccagctcaagtatcaaatatttccaagcagatgctccccaaggttgaggcttatcacaagcgcaagctaagcgacaagtttttctgtgtctatttggatgcgacataccttcctttgcgccgagaaacgtttgagcgtgaagcagtatatattgccattggcattaaacctaatggacataaggaagtcattgactactgcattgctcctagtgagaacattgaagtctggacagagatgcttcaaaacatgaagtccagaggcttgaagcaagttgaactctttctttctgatggtgttgttggcatgaaaacagccttggccaggacttatcctaaagctcattttcaacgctgcctggttcatgtcatgcgcaatatctgtgctaaagtccgggtggatgaccgcgaaaagatcatgaacgaattcaagcagatacatcaacagacaagccaaaaagaagctgcagctgtcttgcacaaattctatgccagatggaataaagcttatagcaatgtcatcaaaggtttgaaggaaattgagcccgatctgctggtcttctacaattatcccaaacaaatcagagcttcaatttattcaaccaatatgattgaatcctttaacaacgtcatcaagcgtaaagctaagcctaaggcagaatttccaactgaacagtcgcttgatgcatttattggcatccaggcaatgagctacaatgaccgctatttcaaccgaattcataaaggctttggtcaggttcaggataccttagaatcttattttgaataaataattaaaaaatcaatttgcgagaaagaactatttacacaaaagatttgacagtttctcactttcggaggcgaactcatgcttattaaatctttagttattaaaaaagattatttaacaacagttaatgaaaaagccacattagcagaagctttaaaagttttagaagattcaggctacagatgtgtgccaatcgttgacgatactggtactattttccgtggtaacatttataagatgcatatctaccgtcataagtcacaaggtggcgatatgaatctaccagtaacttacttacttaagaatgccactaagacaattaaggtcaattcaccattcttcaaggtatttttcaacattaaggacttgccttatattgctgtccttgatgaagataatcatttttatggtattcttactcactcaagaatgcttgatatgttgtcagatgcgtgggatgttaaaaatggttcatacgttttgaccgttttatctgacaatacacgtggtaacttgatcaagatgtccaagattgtgtctaagcacactaatatgtctagtgtaatgacacttgatgcagctgctggcgaactcgaaggtaattttgttagaagaacactctttactctccccgctggtgtctcagatattaccatgagaacgattgttgataagttacaaagaaaaggtttcgtagtttctgaaatcgaagatttgcaagccggcatgactattatgagtgatgaaaatccaggtgtctttattgaacaccctgttaaggattaaaaaactgatctaccaaaaagtgtctgggaaaaaactaagtctcagatcatgaaaaaagaacgttgaatttttgtttcaacgctctttttgtatacttttagctccagccttgatattattaaatcatcacaaaataaaaacaaaaaggtggaaactaacatgtacaaaaattatatcacaggtcaaactgctttaacacttaatctagattttgccattccggccaatcatttggctaatgtcatcagctggtttgtagattcaattccagaagatgttttagtaggcaagactgctaaaacgggccgcccagcctatcatccagccatgatgctcaaaatactgctttttgcttactccagaagagttttttctggcagaaagattgagttgatgctggaagaaaatctgccaatgatgatcttggctgaccagcaaaagatttcatatcatactatcaataattttagatcaagcagccatgccaatgaactgattaaaaagagctttatctacttcactaacctgttagaagatgaaggcttaatcaatgaaggtgctgcttttatcgatggtactaagattgaagctgatgctaaccgctatacatttgtctggcgcaaagcggttgaaaagtatcatgaaaagctgaaaggccaggcagttgaactttatgatgaattgattactaaagaagtagtcaaagaaatggaaaaagaaaaagttcaaactagtcaggggctaaaggaattagctcaagaaactgaagcagaaattaacaagctgactaaagagattgagcaggaaaacaaagccattcctggcggttcacctcgaaaagccaagcgacgtggactaaaaaagattctgcaccggctaagaaaagattatgtgccaagaatgcaaaaatatgaagaagccgaagagatctttgccggacgcaacagttattccaaaacagatcatgacgccacctttatgcatatgaaggaagaccacatgaaaaatggtcaattaaagcctggctacaatattcaagcagtcacgaccgatcaatatgtagttgattatgccatctttcctaatccgacagatttcaaaactttggagccggttttggatcaaatgaccgtgttggacaagtttgacaaaatcgtcgccgatgctggctatggcagtgaatacaattattcgatgctggaggaaaaatatccagacaagaagtactttattccctacactatgtatgaaaaagaacagaccagaaagtataagaatgatccaactaagctaatcaactggtactacaatgaaaaagatgattattacattgatcatcatggcgtcagattcaatttcaaatattacagccagcgtaaggatcgttctactggtcaggtccgtgattttaaggtttatgaagcagacgagttccagctaacgccagaattggaacaattggctaaaacagctagcggccgccagcgccaagttcgctataatcctaactggcaatatttaaaagaaaaagcaaaagaagttctccaaagcgaagaaggcagacacatctatggcatgagaaaatatgatgtagagccagttttcggacatttgaagaacgtatttggcatgcgcagaacgcacctgcgaggtaaagagaaggtcgaaaccgatatcggaattgcctttatgatgatgaatttgaacaaatattgtcaaagaaggtggctgaagggccgatttttattgttaaaaattttaaagagaacaaaaaaacgatcaagattcttaaaaaaggaaatcttgatcgtttttattcatctggaagctagttttttcccagacacttttttattgcctaacttatttttcatagtaaacacgaggtaaacgatcgtttaacaaacatgctacttcatagtgaatagtatcaacataatctgcggcggccttaatattatttggcgctgttggatcattggaaatgatgactaccttagttcctaacggcattttctttggcattttgaccataaattgatccatacaaattcggccgacaattggacagtattcgtctccaactttaactttaaagccttgaaactttctaataaagccatcagcatagccaacaggcacagttccaataattgtatcttgatcagctacaaaggtagaaccatatcctactccgtcaccttcatgaatagtttttacatgagttagttcactctcaaatgataatgctggttcaagcgaaattgatgacttcaagtcaggactatcaggattagaggatgggttcaaaccataaatgccaattccaaaacgaacacaatcactaggcacatccttgttaaagatgctggcagcggtattgtctacgtgaatccacttaggcttaactgtcaacaaacttctcatatgagcaaatttttctacctgatgcttaaagtaagtatcatcagcactgtctgcggaagcaaagtgtgcgaacataccctctacgtagaaattatcgttattttgtaagaatttattagcagcaataaaatcctcatcttcgttaaagccgatccgacccatgcctgaatctactccaatatgaactttcaactgtaactgctctttttcaaggtacttttctgcttcctttagccattcaaggttaggaatcgttaatgaaacattgtttgcggccgcaattggagcgtattctggagaaactactcccaaaactaaaattggcttaacaatgtcagcatgacgcaattgcaaggcctcatctaaaatagctacacaaaggcctgctgcaccttcctcaatcgcaattttagccacctcaactgcaccatgaccataagcattggccttaactacagctaacatcttttgccctgttgcaagatgtttcatttcgttttttatatttcttctaattgcgcccaaatttacctttacaacggctggacggtgatagcctggaaccatatttttatttttcctccaaaactacaaatgtaataatttcatgattatcatgtgtgatacttgggaaaatatttccatcaaacttagttgaagtcataacgggatgacctaaatcatcccataaagtttcgacatcttgaaaaccaatatactttcccagacccgttctcattgctttagaaaaagattcctttaatgaaaagcgtccgcctaggtattcaactttacgtttgcctgccattttttgatattgatcaaattctttgggagttaatacttttttggcaaaagcatcccccttgtccacgatcttcttaactcgttcaacttcaatcgagtcaattcctactcctttaatcattattttcacctcacacaatgacatcattataatacaaaaaagaagctgtaaaaattacaacttccctttttaagataaaatcctaatctttcttattcttgattacaaattcatgtccgttgccacgaccacgcttaccgcggtttccattttggcggtatgaattattgttactacgacggcggtggttatcgcgtccatgattattattgctacggccatgacctttaccacgacggcggcgaccatcacccttgtatggtaacggcttttctggggtaatcttgactttaacctcatctttagccaagttctttaaaaaggctgcaactaagtcgagagctgaatagttatccagcagctcacttgccccttgggtatatttacccaaatcaccgttcatcaaatcttcaatttcaatttttgcttgctttaattgaccatgtaatgcctgatcatctgttggcggacgaagcggcgacatcttctttttagtcaattgctcaatggttctcatatagccaatctcgtttggcgtaacaaaagtaacagagattccattttgccccgcacgaccagttctaccaatacggtgaacatatgaatccggatcttggggaatatcataattataaacgtgggttacgcctgaaatatcaagtccgcgggcagctacatcagtagcaaccagaatatctagcttaccttcacgaaatcttttcaaaactgacattctacgcgcttgcgatagatcaccgtgaatttccgccgcattgtagccacgcgcttgcaaaccgcgcgtaagttcatctacgcgacgtttggtgcgaccaaagactaaagccaaatctggaccctgcacgtcaattagtcgacacataatatcaaatttttcagactctttagcacgaacaaaatattgttcaatcaaatcagcagttaattccttagctttaatgcggacaatttctgggtgatccataaatttttcgcctatccgcaaaattggcttaggcattgtagcactaaagagtaatgtctgttgtcggttcttagcatatttcaaaatactttcgatatcttgaataaaacccatatcgagcatttcatctgcttcatctagaacgacagccttaacttgatctaaattaatagttttgcgtttcaagtggtcaagcaaacgccctggcgtaccaactaaaattgatggtacatggtgtttcaatgagcgaatttgacgaccgatatcagctccaccatagaccacttgaacatgagcatgttcgtcacgacctaaacggaataattcttcttgcgtctgaatagcaagttcacgcgttggttcaataataaccgcttgaattgctttttcttttttgtcgatcatctgtaaaattggcaagccaaacgcagctgtcttaccggtaccagtctgggcctgaccaattacatctttgccttgcaaagcaaggggaatagtttgttcttggattggagttgcttcttcaaagcctgaacgtttaatcgctttaagaagcgcatcatttaatcctaattctgaaaatttcaaaaaaatttttctcctatctcagtcgggctaagacattttctaggtgcattccatgcgaacctttcaatactacaatgtcatccgacttaatatcgttcttcagatcatcaatcattcgatctgtttgttcttgtgtataataatgcaaatgttctggctcatatttgccttgtaaagcatcatataaattcttcatttcagagccatataagtaaacttcgttaataatctggggatccattgtatctgcaagaccagcatgcaattccggcgactttttacctaattcaagcatatcacctaaaacagcaattctacgaccaccatcttttacttcaacttggccaaaactagtcaatacagctctaacagcagttggatttgagttatagatatcactcatgatgctttcgccagcatcgcctttttcccactccatccgattagccgttggggtaaagttagacaatgatgaggcaatttcctcatcactttcaccaaaatgacgaccaacactaattgcggccattgcgttagaaacattgtgtttaccaatcattgggattgagaatttttgctctgaatcattaactgtaaaggtagcatgatgcatataactcttaaagccagttgcatgaactgtatcttcatctctaaaaccaaaagttgctttagcttgatccaatttctcagcacgttcttgcaataatggttcatccccattgaagataaattcgccatcttcacgcaaaaagtcagtaatttccatcttagcatctgcaatcttgtcgcggctgccaaagaattcaatatgagcttcaccaatcattgtaattacggccacatctggatgggttaattcacttaaatgatgcaattgacctggtctgtccattcccatttcaagcaccaaaatttcagtatttggcttcatctcaagaatggtcattggcacaccaatctcattgttaaagttggcctgagttttatgtacattaaagcgtttagacaaaacagcagcaatcatatccttggtagtagtcttaccatttgaaccagtaattcccactacggttggattaaccttacgcaaataatagcgagcaagctcttgcatagcagcaagtggatcatcaacttcaataaccgcaatatcttctgacttgttcggatgcccctttttccataaagtagcagaagcaccattattaatagcactagctatgaattcgtgcccatcacgttcaccttcaagtggtacaaataatccaccatctgtgatctttctggagtcaaaggcaacagaagtaataacagtttgattgtcaccttcacaagtagtatttaaagccttggcaatttccgccatttgcattttcattgaatatttactcccataaaaacatttttatacagaaaacattatactgtctttcatgcattctgccaaataatctctaacgaaaaaagcagccccaatgggactgcttccaccagataaaaggtttacttcttcaaaccgtacttcttgttgaacttttcgattcgaccatctgcttgagcaaacttttgcttgccagtgtagaatgggtgtgaatctgatgaaacttcaacacgtactaatgggtaagtttcgccttcgtagtcaatagtttctgatggcttcaaagttgagccagctaagaacttagcaccagttgctgagtccatgaaaactacttcttgaaattctggatgaataccttgtttcataatttattactcctttgccatgatcatatcacagatcatagattaatcgattaacgataactagaataacatcttcaagttagtaattcaagttctttttaattttagcttatttaattgccactgcaaatgcttcataaggcttaagcgtaatatcatgcagatcattacgcacagcataattactaagcaagttttctttaatgcgatcggtcgacgtaaactgttgctcttcaccagataggttagcaaccaccaaccacttttcagtacctaaaatacgataatatgcaagaacttcatcaccagtatcatgaaccaacttaaagtcaccattaaccacaatctcattttcatgacgtaaagtaatcaattcttggtaagtataaaaaatcgaattaggatcagccaaggccttcttcacattaatttctttgtagttaggatttactgtcaaccatggctttgacttagtaaagccggcatttttctcatcattccattgcattggacgacgagcattatccctgcctttaacattgatcgcatgaattagtttatctttgtcataaccttcagccagacgttcatgatacatattgacactttcaatatcttctacttcatcaatattttttaccggacaattagtcataccaatttcttcaccgttaaaaatatatggtgtgccgtgcatcaaatgtaaaactgtcgcaaacatcttagcacactgcacccgatattttttatcattgccccaacgtgaaattacgcgcggaatatcatgattttcccagaacaaactattccaagcatgattaaaatcaagctctgtctgccactttactaaaacctttttcaattcgcctaagtctagcggctttaaatcccacttttcttttccttcctgctggtctaaagcttgattctcaaattggaaaaccattgataattcatgacgtgctggatctgagtactcttctgcaatcttcggtgtcgcattccaagtttcgcccaccgtcatcacatctcgatcaccaaatgtattcttgttcatttcttgcaaatatagatgaagcatcggaccattttcacggatcattttgtcgggatctttaccaattaattcaatcacatccattcggaagccaccgatccccttatcaagccaaaagttcatcatatcgtagattttttgccgcaactctggatttttccaatttaaatcaggttgttgttccgcaaagaagtgtaaataatattgtcctgtttgctcatcaaatttccaagctgaaccagaaaaagcagacttcaaactattgggctcatgtccatcaacaggatcacgccaaatataatagtctcggtaaggattatccttactttttcgtgcctccacaaaccattgatgctggtcagatgtatgattaaccaccagatccattacaattcggatatgatgctccttagctttctgaatcaactcatccatatcagccatcgtgccatattgcggatcaatcgcttcataatttgaaatatcatagccattatccacaccgggagattgatagaccggtgaaagccaaattgcatcaactcctagattttccaaataatctaaacgagcaataattccttgtaagtcacctatgccatcaccgttgctgtcctgaaatgacttaggataaatttgataaacaactgcttttttccaccatggtgtcattttttctacctcgtaaatttcaaatttattgttaaacataatataaataatttatgtaagcacttgcaagaaatggtaaactgttaacggtatcaaattttagtgaggtaattagatgactactcttccctttaaggccgttgctgtagacgttgacggtacttttgttaacgatgaaaaacaatacgatcatcaaatgtttagcgagattttaactcgtctgcatcaacacggggcacattttattattgctagcggccgcccagctggtcgtttggctgatgactttagcgaatttatcgattctattgactttgttgccgacaatggtgcggtcttagttcgcgatggaaaaattattcgtacaacaagcttttcaaaaaaatgcatcctaaattttattgaatatttgcacgcacgctatcctggtgcagcccaaaacattttaattagtggcgttaagcactcctactttttaaaaagtacaccaccagaatacaagcggtcccatcattatttttatcctaatagcatcgaaattgatgattttaataaaattcctgctgatgaccaatacactaagatcacaatggactatcccagcaagattcgacatgaattagaacatggcttcaacagccgtagtacagaaaaaatccacgtcacaactagtggttggagctacatggatattattcctgaaggtgtaaataaagccgcagggctaaaggaatttttagcttatttagacgtgccaagaagtgaattaattgccttcggtgatggtgaaaatgaccttgaaatgttgaaatttgctggtttaagttatgccatggctaatggtcaagatatcgttaaaaagactgctaaatttattgcacctactaataacgacaacggtgttttcaaggtgctaaataagtatcttgatgaagcagaatagcgaacaaaaaactgttgagactaaaaatcccaacagtttttttacttattctttattttgcgcaattttttcagcataaggatcgattttctttaaccctgtcttaattccccaataatagaaggcgagagaaataatgataattactacaaagtcaaatggatacttaatccagttctgaccaccaaaaccgctactgcccacaaaggacataagtgacataaaaatcaaataaccgatcatccaccaactactatgtaattgttcttttaaatttgaatgttggtagtgaatttcataataaaaataaatcggcaaacccaaggcaataacaattatcacctgaatagtcgttggccacattgaccagtaaattgccaaactagttagtataaaggtaactggagctagccacttcatataaccaggattaaatggacgatcaagatctggtcttttctttcttagagtcattaccgtaactggaccagtcaaatatgcaatcaaagttgaggccgtgattactgttgctagtaaattccagtttctaaataagcttactaaaataaccgccaaaacaaagtcagcaatcatcgcataacgtggtattaagtatttttgattcaatctacctaaccattttggcaaatgacgtgtgtgtgtcattgccgctagggctcttgaggccgtagctacaaatgctacccctgtcccaaatggtgaaacaaatgcatctaggtagagcaaaatcactagccaattaatgcctaaaataatagcaatgtccgcaaatggtgaggtaaagttgatcccatgccagcctactttagctaacatgcctggctcaactgcaccaataaacgtcacttgcaacataatgtagattgccgcagtaattaacattgagatcaataccccacgcacaatattcttacgcggatttttcaattccccacccatattgatgaccgtctgaaaggcatcataagacataataattcctgaaacagaagttgcttcaaaaatggaccgactaccataaggcataaattcatgtaaattactgccaaagttttgtccatgaaaacctgaagcaattaaaactgtaatcgtcaaagtaggcaataagatcttaaaaatagaaatcaaattggtaaaatgggtcatgattttaactgacccaaaattgatcattgtaaaaatcagcataaaaataataaccacacctaagccagcaaaagtaatactgccgtttttaataaaatttttagtccagttagcccagctccagggccaagaactcatatattgcacggcagctacggcttccatcggtaccaatgtgactagtgaaatccagttagcccaagcagccacaaagcccaataacggcccatgactatattgagcgtatcgactcatcccgccactttcgggaaacatcgaacctaattctacataagtcaatgcaattgagatgataattactgcacctaaaatccaagataaaattgcggctggacctgcaatttgtgctgcagaacctgaaccaaaaagccagcccgaaccaattaaagaattcaaggccagcataatcgctgaaaataagcctattttatgtctttttaacttttccaaataatcacgtttccttcactcttaactccattatttttaattttttattatagcaaaagccgccccagctgagaactaggacggctaaattctgctacacaaattattcaattggatgttttttagttaatgcctgaacttcttctttaacgtgggcaatcgttgcgggattttctggatcagataaaatttcaataatcatttccgcagtcttcttagcatctgcttcatcaaagccacgactagtaattactggcgtaccaatccgcaacccactagtaacaaatggtgaacgttgatcgcctggaattgattctttgttggtagtgatgtgaacagagtcgagtaaattttgagcatctttaccggtaataccagtcttagtaatatcgataatcatcaaatggttatcagtaccaccagatacgacacgaatattgtccgattcagcaaaagtttctgccattgccttagcatttttaatgacttgcttaatataatctgtaaattgtggttgcaagtcctcataaaatgcttgcgctttacctgcgatgacatgctcaagtggcccaccttgaatgcctgggaacaaagcggaattgattttcttaccaatttctaaattgttggacaaaatcatcccaccacgagggccacgcaaggtcttatgtgtagttgtagttactacatcagctactggaacaggacttggatgttgaccggttgctactaagccagcaatatgagccatatcaaccattaagtatgccccaacttcatctgcaatttcacggaacttttgccaatcaatgatgcggctgtacgcagaagcaccggctacaattaacttaggtttaaccttaagagcaatttcacgaatggcatcaaaatctagttcttcagtctcaacatttaggccgtaactgtaagacttatattccttaccactgaagttaaccttggatccatgagtcaagtgaccgccagcatccatgcccatacctaaaatgacatcacctggcttcaaaagtgcttgataaactgccatgttagcctgtgatccagagtgtggctgcacattagcaaactttgcgttaaacaatttttttgcataatcaatagccagttgctcaacttgatcaatatattgacaaccgccgtaataacgccgaccaggatatccttcagcatacttgttagttaaaacagaaccttgtgcttcacgaactgcatcagaaacaatattttcagaggcaattaattcgatggtgtcttgttggcgctgttcttcatgatgaatggcatcccataatgcgggagatttttctgcatatttcattgataaaaagacttcctttctaatcaacactgatagtttttcttatagttaaagtatactatttagcaatcagatatgcacgattactacgcggaaattcctttttaaaagccgctaaaactgcatgacggccaacagctggatcagtcaattcatattcctgcgtaaagttcaaatagccatcttcagttaaaattagctttttaccatcatttttcacactaattgaacgatccttttttgccgttaataatttaatttctacatatttacttttattactacacatttttttgagcaaagtctctgcctgcttaattggaattaaacgcataatgacttcctttcagaacagtttctaattcatgactaaaactatccttctgtaaattagaggtaatcaaaagaactagtacttgctcatcctttactgcaaaagcgactctcgctgaacccgcttttttcaaatttaggcgaaactcgtaaattgattttcccttaatccgagtcattgcagcgatcttcactttagtcataccagttgccaattccttagtaatcgcttgatcgattaactgcttaattatcttttgctcattcttatgctttttaaaaaaggttttgcatccccgctcataatgaaatttcaatagcatcattttctaaatcaatccatttccataatagcaaaacatagatactcactttttgaaaacttgttattttcatctaaaataaaaccgcttgtagtataatctacaagcggctcaatattatgagacatcatgcttagcttttaccatagctaagcatgttttcgtatacaactaattacttttaaataattaccttataacaacgtccgagttaagcataacactattcagtatagctttaaacgcctttattataggctaatagccacttaattatagtaaactgtaaaaaataaactatttcatttttctatcctaatcaaaatgtaacacactaggatcaaatgacttagtatctttaacgccagtatataacatcatttgtgcaagctgctcattcattttcttaatcttatcttctgttgctttttgcccgtcttttaacaattcagaaagaatcccgcgaccaatcagtacagcatctgcgcctaaggccaaagccttgtatgcatcgtagccagtcatcaatgatccatctacaaaaatggtcattccactgccatttagtgcttgcttgattgctggcaaaacttttagtggcggcacgccaaatggaacgcggccgtggtgatgtgaaacaactattgccttggcaccagcatctctagccttaacggcatcacgcacggatagcacgcccttagccacaaacggcagtttaactgcatgaacatacttttcaagatcgctaaatgaaatcggtcctagtggaataccatcgactacatcatatttaccattatcaccaggcacatgatcaatatccattccaacagctacggcacctaattcttctgcttgttttagttcgcccataattttatcatggtctgcgtaaggcttcacaattctaactgtatcgccgccctctttgacaatttcggcatattcttcgtttgactccatgccaatccaatttaaagtattggtattcttagccgcacgtgccttttcttgcattggcttacgcgtcttatctggtaaaaccctgttcaaatgagagactgcagccagagttaaaggtgaggcatattttttaccaaaaatctcagttgttaagtctggctcaactgaatcaagcaaacgcctctccaccaagatattgtctaagtaggcacgattatgtacattagcatcgtcagcacgcccacttgttacaggaatcatacctttaggacccggccatgggctttttactttttcttcttgattctctatcaaagaagcaccagttactgcatcgtttttttcgttcataaaaatacctccctaattattcttttgtctaaaactatagctcacttttgtcaaacaggcagataaatacgcacttactaaaatgacaggagccaactctattggtaataacagaatcaataaaatagctgttaataaaggtttacccaagataactgcaatacttgcactaactgtaatggctacacacataactggcataattggtaaaaattgcgcaatcgctgcgccaactgctacactagcaaaaatcgaagggaaaatttttccaccacgccagcctaaactaaaacctatattagtagacaaggttttgatgactgctataactagcaaaaataatggtgagatttgcaacgcctggtgtacaaatggaacaatttgaaattcaccagaatacagggcataactagtaattaaggtaagtaatgcaagaactattccccatatagttgctttaataatcggtgaaatagtaatttttttagcaaaataatcactccatttttcgctccataagaaaaacataccgaagctccaacctacaattaatagaataattacatacatactatagcgccattgccagagaatatggcgatgatgaataccaaataatccttcttcagggaataatttaaagactattgctgcaccaaccacgccgatcataaccataattaagcaaaaaactttttgatacaattttgatttaaaaaggctactaaattttggcagtttttttagttgttttttcgaaacgatagtatcccaaaaatgattccatttccaatcagaagaataagcaattagtcgtaatctatctcccagccaattaaccatgccacttcctagtacagtagttgaagcctctggtccaatactgccacccgcggctaaagaaataagacctaaggttaaggatttccaccaattgtgataattgatctttccctcctgcttaacactcattaaaacttcttcgatagttaatggatatgatcctaaacgcttaattaatataccaataatgaaaccaaaaggaatacaaataaaaaacggtaaagcctgactaggaacaggtaatttatcaaacaaaacatgccagacaaaattaataataaaattaattaagtttaaatatgtagcacagcatattccaataataaaactccaaatggtagcataataaaatatattaagtttcttcattaggattttttccgaaactgtcaaatcttttgtgtaaatagttctttctcgtaaattgattttttaattatttatttaatcaaagtaggattctaaggtgtcctgaacctgaccaaagcctttatgaattcgattgaaataacggtcattgtagctcattgcctgaatgccaataaaagcatcaagcgactgttcagttggaaactctgccttaggcttagctttgcgcttgatcacattgttaaatgattcaatcatgttagtcgaataaattgaagctctgatctgcttgggatagttataaaagaccagcagatctggttctatgtctttcaagcttctgataacatggctgtaaaccttgccccatttggtatagaagtcatgcaggacagctgtggcttcttctttgtttgtctgttgatgcacctgtttgaattcgttcatgatcttttcacgatcgtcgacgcgtactttagcgcagatattgcgcatgacatgaaccaaacagcgttgaaaatgagctttaggataagtcctggccaaggctgttttcatgccaacaacaccatcagaaagaaaaagctcaacttgctttaagcctcgggatttcatgttttgaagcatatctgtccagacttcaatgttctcgctaggtgcaatgcagtagtcaatgacctccttgtgcccattaggcttgatgccaatggcaatatagactgcttcacgctcaaatgtttctcggcgcaaaggaaggtatgtcgcatccaaatagacgcagaaaaacttgtcgcttagcttgcgtttgtggtaagcctcaacctttggaatcatctgcttggaaatatttgatacctgagctggactgtaatggctgccatacatcttttcaattagatcggctatttccctggtggtcacgcccttggagtaaagcttgataatcatgctttccaagatatccgagtgctgcttgtagtcaggcagcgtgtgctgatgaaattgaccgttgcgatcccgaggcacttgcacttcaattgggccaaattgcgtatcaactttgcggaaataagcaccatttctagagttgccagtattccagccatttctggcatagggatcatagcccagaaaggcagtcaattcagcttctaacaagttattaacagcctgttgtagctctttgcgcaataaatcatttattttgtctggattgaatagagcttgagcaaaatctttggtaaaatcattcatgaaggagttcttctttctgtatgtgtttttttgttcaaaccaatcatacgagaaaggaactcctttttctaatgtttaaagaaataaatttaaggaatcattcatccttacacaaactattttacagtctcttttttccttctctaattctcaagaattgaaatttctttttaaaaattatcctgaattgtcaaattaagtgcaacagttaggttatgaagagatatattgcttgaagagttcctctgctgtgtgatattggaggattcggcgatatttgtggttaatggcatcagttgcctgttgaacataagcttttgacttgtctttcatgctcttgcccttagggaagaattgacgcaaaagaccattgcagttctcattggtgcccctttcccatggagaatatgggtgagcaaagtaaatctggcagcccttgatcttggtcatatccgcaaactcagagccattgtcaaacgtgattgatttaaaccaggcaggatgtctgtcaatctccttttgaagcagcctttggcatgtgcttgcccgatagtcaggaatcttgataactacttcaaagcgtgtggttctttcagtcaaagtcattaaagcaggctgattcttgcgtctgacgcctttaaccagatctccttcccagtgcagcggagcttttctgtcttcaacctccttaggacgctgttcaatggaattgccaagatgcttcttgtgcaaagcgtgaccgccatggctgtgatgacgcttgttcctgcgtcttttgagcttcataggcagatcaatattgcttatgtccagcaagccctgatcaatatagcgatagacggttggtgtgctgggacaagggtagcctggcatagtccttttgaattcaccaacgaactcatcgatgctggtggcatcaaatttagctttaaagcgtctggagagcattctcaaaaagacagcataatgcttcaatggattgcgctgatagcagtttttgcgacgcttctcataataaatctgtgcagtatcagcgtaatagtgctcatacaataaatagctgctgtctctttgcaggacgcttccgcgtttgatttcgcgactgattgtcgacttatggcagccaacttcttgagcgataacagtacgggaagttatgccggaatccagcattgcttgaatttgtccacgttgtacgctggttaattgatgatagtgcttagaaatgctagaatttgaattggtcatgaagatcttcctttcttgatttttcgtcacttcaagtttaggtcttcatggcctttttgtttaacacttagtgttgcacttcaattttaaatccgggtttttaaaaattataaacttttatactcgtaaagcaaaaatatagttaaaatactggtataatatcgtttcagaataattaatgtagaggtgagatttctgatcatgaaaagtgcaaattacactagaaaacatcacatgtatttaatgaatcacaaaaatggtgacgttatcgaagtaagaatggataagaaaaataagacattcaagaaaatacgactttatcgtcaagatggtttgggcaactactatctagatccacatgcggagtttaaggatcagaaaagtccagcaaccaaagagaatatcgtagaagccggaaaaaaggtcagcgatcatatctctagtgctgagaactggcaccataaagttagacctattttcaacgctgaacacaaaatcgtcgatttcgaaccacgattgcatttggaacaccatactaagattcaaaatgctaaaagatatttgcgtcacttggaaagacgacacgcagacttcattttccgtaaaaatagcaaaacgcctttgttaatcccatggaattacatcaaggatatgatctatgaagatcgcaataaagaaatggttctagcccataaggtgcacaagttaagaaaatagtctaaataaagtgtctgggaaaaactcagaaattaagaaatcctaataaatcttggtatcaataaaccttgatttattaggatttttttgagtgaaagtctaaaattaattaaaaataaactttttcccagacactttgttagagtaaaaatttagtattttacgcgttcaccttttttaacaatggtcaacatactacagaaagagttcaaccatgtcggtttacgagagtagctttttgatgcttttgttggctttgctgacttacatcgaccaccacaaaaaataatattaagctttcttaattctaaacaataagatttctacccaagataattgtaaattataactatctatttatactgaagataatggctatttaatacttatggaggaaccaatgaaaaaatattctacactacaaaaattcaatgccttggtccaaatccaaacaattattatctcggctctgccatatattatcggctcggtgatggctagctactattatcacaactttaatctagtctattcattatggctatttttagctgtgatttgctttcatttagcagttaatggtcataatcaatacacagattacgcacgttataagcaaaaccatataactagctacaacaatatcctagagaaatttaatattacgaaaagctgggctcgaaaaataatcattattttgacgttaatttctgcaattatcggaactatccttagcattaaagtcggttggattattttattaatcgggattttaagctatctaatcggctattgctactcaggtggcccttaccccattttaaaaactccttttggtgaaccagcttcaggaattacaatgggctacaacattacatttttaggcctatatatcaacatgtataacgtgcatcccttcgataattttttctgggctaaagccattatcgttgctggaccggcaatttttgtcattgccaatgtcatgttagccaacaacatctgcgatgtgactgaagatgtcaaaatcggacgtaaaaccttgccctactatacaggtcgaaaaactgccctgactattttatgttgttactatgtattagcctacatctttttaatattggtaatagtattaaaatatttgccagttattactttagggagtttacttactattccgcttgtttaccacacaactaagactttcgtaaaaaatccacataaagaatcaacctttacaggcatcttagtaaatgttctattagtactaattagtgaaattattttctcgcttgttgggttggcaatataaaaataaataaagcccgcaaatttaatcaatgtcattaagttaagctattgacattggagaaaaaaacaattaaagcatcatttggctttagatagccaatttgatgcttttttgcgtatgctaaataagcgtagtttgtatttcttttttaattaggccacgcgatacatgtaatatactgcagacttggcttttaaatttcgtttgtcttttcgcctttatttttgcaaaaaaaagaatcgaatccaaatgattcgattcctaaaaagatcagttttcaaaagtcaatagcttaacttaatgacattggaagtctaattctaggtcatttttctttaaagaaagcagtaaatgattacgagctggcttagactttttagcttttggctcacgaacaagagggacgattagctttttttctgacatatgaataacctccaaaatattgataaattaatcataattgaaatctaaaactaatctagatactcggttattttacgcttacgtagaatcttgttttcatttcacacaaaaaggcgatcaaaaacaatttttcaaaagttttcgatcgtctttttaaatctgagaattaactttctctagatacttttaccaatagaatttataaaaaactattataaattattctttatcgcgcttcttcttaaatacgaatagaccaagtgaagctaaaagcataccaagcacacccaaaattgaagtatctttagtgcctgtttgtggtaatgtctttaagctagtagccttgttattaccaatggcattatcactttcacccttaacacctaggttgttaccagcgtttgcgatgctgccattagcagtagaagctcccttaactccatcagcttgactagagtttgaaccattcttatgtgaatgatgcttgcttccaggaacatcttcgcttttagcagcgatgactaaatcagtaccagcaatgacatcctttgaaccatctgggtaagttactgtagttgtaccatcatcgcctactgtaataactgtgcctgctgggaacttatccttgttggcattatcgacgttgttcttaacttgattcttttcatcatcagttaagtgacttggatccttaacagttaccttgccacctggaatagttggcgtaatgttaccagcatcagttgtgtcgcccttttggccttgaactaattggtcacctggtatggtgtcttgtgaaccatctgggtatttaatcgttgctgtaccatcatcgcctactgtaacttcagtgcctgctgggaacttatccttgttggcattatcaacgttatccttaacctgattcttttcatcatcagttaagtgacttgggtccttaacagttaccttgccacctggaatagttggcgtaatgttaccagcatcagttgtgtcgcccttttggccttgaactaattggtcacctggtatgatgtcttgtgaaccatctgggtaggtaattgttgctgtaccatcattgcctactataacttcagtgcctgctgggaacttatccttgttagcattatcgacattattcttaacttgattcttttcatcatcagttaagtgacttggatccttgactgttactttgtcgcctggaatatttggtgtgatattgccagcgtctgtttgtcctgaagttgagccgctatcttcacccttaactaatttatcaccagggattgtatcagttgacgtatctgggtaggtaattgttgctgtaccatcatcgcctactgtaataactgtgcctgctgggaacttatccttgttagcattatcgacgttgttcttaacttgattcttttcatcatcagttaaatgacttgggtccttgactgtaactttatcgcctggaatatttggtgtgatattgtcagcgtcgttttctggacgtaccaaatctccacctgggattgtatcctttgaaccatctgggtaggtaatcgttgcgttacccttgtcatcgacatcaatcgtacctggcagatctggatttactttgccgacctcatccttaaccttatccttgtcatctttagttaagtgttctggatcttttactggtactctgtcgtctgggttctttggtccttttggatcgtatttatctgcgtcgttttctggacgtaccaaatccccacctgggattttatcctttgaaccatctggggattttattgttgctgtaccgtcatcgccaactgcaacttctgtaccctttggaagatctggatttactgtgccgacttcacccttaaccttatccttatcaccatcagttaactggtctggatcttttactgggactctatcatctggattctctggtccatgtggatcatgcctgtcagcgtcgttttctggacgtaccaaatccccacctgggattttatcctttgaaccatctggggattttattgttgctgtaccgtcatcgccaactgcaacttctgtaccctttggaagatctggatttactgtgccgacttcacccttaaccttatccttatcaccatcagttaactggtctggatcttttactgggactctatcatctggattctctggtccatgtggatcatgcctgtcagcgtcgttttctggacgtaccaaatccccacctgggattttatcctttgaaccatctgggtaagtaatcgttgcattacccttatcatcgacatcaatcgtacctggcagatctggattttctttgccgatttcatccttaaccttatccttatcaccatcagttaagtggtctggatcttttactgggactctatcatctgggttctttggaccttttggatcatttttatcagcgtctttttctggacgtaccaaatccccacctgggattttatcctttgaaccatctgagtagataatcgttgcgttacccttatcatcgactgtaacttctgtatcctttggaagatctggatttactttgccaacttcacccttaacattatccttatcaccaccagttaagtggtctggattttttactgggactctatcatctggattctctggtccatgtggatcatatttatcactttgatttggctgaacctttacagtgactgtagttctagtagttgaaccatctgggaaagtagtttcaactacacctgtacgattaccagttgttgaagtatcagggggagttacccatttatgtgtagttccatctgggaaactagctggttgaccatctggagtttgagcaacaactgttctttctggatcaacttggctacctcttggaacagttacaccatctctaggtgcaaccttgtattcatcacttttaccattaacatgaacagttacagttactggatcagatttgctgtgatctggatctggataagttacagttacttcgccagttacatccttaccagcttgactaaagtcaggtttcttagtccattctactattgagttttctggtaaagtagtcttattaccatcagcatcctttacatcgatagcatcttgtggagctaatgtaccgttcttatctaccttaagaccatctttgccatagatgtggtacttttccttgtcatctagcttatccttgacgttaatagttacaggaacttcatcttggctttcatcactgtaagttacttttactacaccagatgcctcaccagttttacttgtgtctggttcagtcttccaagtgtattttgcatcacttggcatcttcttaccattcttatcagtgcttgaaattacttcatcagccttaggcgttttgccaacagttgtagtccaaggttgggcttgtggatcataagtttctgcatcagtctttacatgaattgtaacatcagtgtctttcttagatccatctaggaaggtaacttcaacactaccagttttatcacctggagtagtcaagtcaggctttgcgccatccttccagtcaattgaacctgctggtagttgtacttgcttgccatctggatcggttactgttactaagctagctggatctacatcttctcccttatcaactgaaacttcattattaggagttacagtgtagctttctgcatcttttttaacattaatcttaacaggtacttcatcagcactatcatcattatatgtaactattacttttggactaatagatcctggcttacttgtatctggagtacccgaccaagaataactttttacattagtcaaactatccttattggtaattgcattagcggcatcagttgaatctaatgcatgtcccttttcaatagtaatggtaccaccgaccggagagttaacctcattatcctttggcttgacaccattaagttcgttccaagcatcattttcatctttagtaagctgttctaccgtcgcttgatctgcataggtacctgtatctttgttaatcaaagctttagttacttcagttgcattgtcataagctgcctttttatctggacttgcgtatttatagcgatcagatttctttgttgtatcttccttgtgatcagcaaaactgccatcaggatcatactgtccgatactattaccaagatttttcatagcatcgtttaaggaatttccttctttaataatgttatttacagcatcagagtctgtaatgttatttagaattttattccgcaaaacattaatttgagcattatttaaatagtctttcttaatctcatccagagctctagtggcatcaacccaaccagaaataacatctttaggtgtttttggtgcaccagctggatccagtgctctctgctcaccatataagctagacatcatgctatagtaccaattctgataagaataaatattagctgcgattcctgagaattgttgatttttcgaacctgtagttaattctacttcatgagagtctgtgtattgcgtagtaaaggaaataacataagaagaaaattgtgcattactagtgacaccttgtgacttaaatgacattgcttggttaaagttatcactgctatatacgccattagaattagctacaccgtttttagaatttaacctataccccagtttgtcataaatgattgggtctttatattttgcaccgtcaactccagtttcatttgcaattttaaaagtattaaaatgaaagtcatgattgccacctagataaggggacccatcatatgcattcttacgttcatcagcatctttaaagtaagtctgccataagttcttagcaccaacatcagtagcagtagtgaaatagtatgggccttgcaaatattgattgttataagctggcatggtttcactattaattaaaccagtatttggatcaacatctgtcttaggattaaatgaaaagtctttttcagtttttagattttgtattggaaattcagtagcgctagtgctaccgggctcaaatgtataagattcaaatgtttgattaggattactaattactttcatgtcaacattaccaacgatttggtagtcagaagtgagggcaataccaaattttgcagaacttaacccacttaatttactgccaacattttgtaatcccttattagggaagaaaacaaccttccaacgggtcttaccatttcctaaatcttctttagaaatattgatattatttttagtatcttcagctgtttgtttaggatcccccttaaaatcagcaccactagcttgaatatcagcagcacggtaaacgtagtcctgaccataaatagttacaatcttgtaataatttccatctgtacctttatagatattagaactgtagttatctgaagaagttagattagccttattggccaattcttgattttctttagctagctgagtattaatgttattttgatctactgtacctgctgcatttctgtcagaaccagaagttaccataaaattcgtagctgctaatcttgctgctgatcttgctgctaatgatctaatataagtgtgagcgctaccttgcgtctttggtaaagattgtgaggttgtcgcagcttctgtagaattattagccgttgcattgttacttgcactaccttgcgtttctggtgaagattgtggggttgtcgcagcttctgtagaattattagctgttgcattgttacttgcactaccttgcgtctctggtgaactattggaagttttaacgctttctatggttgctgcctttacagaatgatttgtaaagttaattccaaaaatggttactcctaataataccgaagccacaccaacgctaaacttacgcaaactataacgcggtgtccgcttagtttctaaaaatttaagttgcttcatcgttatttttgcctcccaaatttaataactagtggtatttttaaatccgacaacattatagcacggtttagcgactttgatgacggcttggctcttttttctgtttgcagtcaacttaccagatagtaaaagagactaaccgccaaggctaatctcttttcaaacggcagattgcaagaaataacttgaacaaagttagtgacgcagattacgcaaaaagatctcaattagtgtgcgccagtttaaacatttgagtggcctggagttcaaataccagttaatttgaattaactcatcatcagtgattttctcaatcggttgacctttgggataaagcgtcgtagtactcggttgcgattctcattactgccccattcatgtggagaataagcatgcgcaaagtataggggaatcctggcctgcttttcaattagcttgtagttagcgaattctttcccatggtcaacagtaaggggcttgagattatcttctaactggttagctaattctaaaatggccttggttattgaggtactatctcgtccctgaagccgtttaacgatgataagacgactcttacgctcgacaaacgtagctattgcttgacctttacgctttccagataaaactgtatctgcttcaaagtgacctgaggtatgacggtcaataacttcagcgggacgatcttcaatggaacgtccatggctaaaagtcccacgggtttctttggctcgtcggcggcgaattccatggtcaggtaaatcagccacgccaatatccaatactccttgctcaatccagttgtagatggtcttgtaggcgattctaactacatgagccacttgttcaatcgaccatttttgtcactgaatacataatactttctaactgtgattgaatatcggcgaactgattttgtaagatactcaattgtgatgatgttttagtacctgtaatacccatcaacgcctctgacaatggtaggcgaccttcagcagacagcttggttaataacgctgatacaacgtcagtattaccttgcttccattcatttctggctttctcatttcatctttaatcatctgccgaattgcaacagaattactcttcacatcgagcagtttcttcactttatcaaaatctgctaattcatcttcatcaagtcgactttgaattagctcatcctttaacggcttcatcgtgcaatgaccccctcatgtttgccgtcccggcaaaataaattttcagccttcggttgcgaccgatcagatattgcattcgagaatgagtaccttgagatttcattcaaggtcatttcgagatttcatatctgatttacttatgttttcgtcataagtaacaacaacgatcaaacagactgctccgtttggatttcagcatttcttttgtggcaacaaagagaaaaaaaatgccccacttatcaaatgacaataagtaggacaacagtcacttacttttcaacaaaagtaagcaaaatattcaattttcggtagacaaccccaaaataacgaacaggtaatagtagcgtttaatgcactattcatgctgattaaaatcaacttctaccggtagaaaaacggtagacaacttgctttcaaccggtactttccactaatattgaccctattcaaatgccgtcatattgggatttcctcttcttattaaggtacgaaattattcccactcaatagttgaaggtggcttactcgtcacatcgtaaactacgcggttaacgttatctacttcattgacgattctatctgaaatgtgaccaagtacatcccatggaatttgggcaaaatctgcagtcatcccatcaattgaggttacggcacgaataccaatcgtatagtcataagtacgtccatcgcccattactccaacggagcgaatacctggaagaacagtgaagtattgccagatcttttcttgtaaacctgccttcttgatttcttctcgtaaaatcgcatcagaatcacgcacaatcttaagcttgtcttcagtcacttcaccaagaacacggataccaagaccagggcctgggaatggctgacgccatactaagtcatgtggaatgcccagcttttcaccaagttcacgtacttcgtccttgaacaacttacgcagtggttcaatcagcttgaaatgcatgtccttaggaagaccaccaacgttgtgatgggacttaatcgtttgggcagtgttggtacctgactcgataacatcagtataaagcgtaccttgagctaagaaatctacatcctttaacttcttagcttcttcgttaaagacctcgatgaattccttaccgataatcttacgcttcttttcaggatcagttacacctttcaacttgtctaagaatctcttttgggcattaacccgaatgatgttaacaccaagatccttgttcaaggcttgcattacttgattgccttcgtctttacgcagcattccgtgatcaacaaaaattgcagttaattgatcgccgattgctttgtgtaaaagagtagcagtaacgctagaatctacaccacccgaaagacctaagatgactttcttgtcgccaacttccttacgaatatcatcaaccttcatgtcgatgaagtcgttcatggtccagttagcctcagcaccacaaacctcaaaagcaaagtgcttcaagatgtctaaaccgtattctgaattgcgcacttctgcgtggaattgaatgccataaaactttttatctggattagcaattgcagcaattggacagtttttgcttgaggcagttacttcgaagccctttggagcttgagttaccaaatcaccgtgactcatccaaacgtattgctttgaaggcaagccattgaacaaaatactgtctggatcttcaaccgtaatgttggcgcggccatattccttgttttcagcttgttcaactttaccgcctaagtcatgagacattaattgcatcccgtaacaaatacccaaaattggaatatccaacttaaagattgcaggatcaacctttaatgcaccattatcgtaaacactgttaggaccacctgagaaaatgattcccttaggattgatctgtttaatcttctccatggaaagatcgtgtggtaaaagttcagaatagatgccgaagtcacgaatacggcgggtaattaattggttatattgactaccgaagtcaagcacaataattttatcaaaatcgtctagattcttagccactatttactccctcttttcaattacgcatttttaactaactctactaggaaaaattaaaaaggtcaatcaaaaagttaaaaatagccattcattgttcggcttttatcttgagcaaccagcagttgcaactactagttgcgctaaatgcaattaaaaagtggtggtctgcaaccgcaaattttcgttaaatcaaattatttcaaaacgaaaggacgatcaatcatgagattaggtcaaaaaattgcggcattacacaagaaaaatcatctttttcaagaagcactagctgaaaagatgaatgtcagtcggcaagctgtatccaaatgggaaagtgaacaatcaattcccgatattgaaaaaattgtagctttatcagaattatttggagtgaccaccgattatttactcaaaagcggctcaccttcttttgaattaaaccacaaagataataacttaactgaagaattgccaattttatctgatcaacaagagcaaggctacttaacagctgctcaaaaaagtgccagccttcgcgctttagccattagtttaattattcgcagtccagccatcctttgcttttctactgccctagctattatgcttgacctgggcaatttaacaatccaattaaccggctgtcgcaagattatgaacaaatacgccacactctattggttaatagcagtcttactttatctaggatatagcttcattaccaatgattgggaacgcagctggatcatctggccaatcgcggggatcttatatggcattatcgaaaagatcatcagtctgtgccataacgatatcgcagctgaataatttttactataatcgaacattaatccttaattttccacttgtgttcggcaatatattctgttaagattaagccaacacaaatatctatatatcgtcgaaataaggtcgacagtctctacccggtaccgtaaataccggactataggtgaatgaaagttaagaataatcttaaggacttcttttacctgttttaggtagaagaagtccttatttctttcttgaggagaataatattgaaggaattagtagatcgaattaaacaagatggtgaagttttacctggaaatgtgcttaaaattaattcatttttgaatcaccaagttgatccgcaactaatgatgcatgttggtgaagaatttgcccgcctttttaaagatgaaaaagtcgataaggtcttaacttgtgaagcgtccgggattgctcctggtgtcatggcagcctaccaactgcacgtgccaatgatctttgccagaaagaaaaagccgtctactttgaatgatgcagtttattgggctgacgtcttttcttacaccaagaaggtcaacaataagatctgcgttgaagagaaatttttgcacccaggcgaacatatcttaatcatcgatgacttcgttgcccacggtgaagcagtcaaaggcatggttaacattgctaaacaagccggctgcgacattgttggagttggtgctgttgttgcaaaaaccttccaaggcggaagcgaatgggtagaaaacgaaggcttacgctttgaagccctagcaaaaatcgatagctttgaaaatgatcaagtacacttcgagggagaagaataattaaaaatggcacaaaaagaagttagtcacaaaaaagctgctgtcctaggtttgcagcatttgctggcaatgtactccggtgcagttgccgttccccttttaattggtacggcactacacttcaatagcacacagatgacttacctagtttcgattgatatcttcatgtgtggtttagccactttaattcaactattccgtaataaatatttcggcattggcttgccagtcgttttgggctgtgcaattcaagcggtagctcccttagaaatgatcgggcagaagttttcaattaacacgatgtatggtgccattatcgttgctggaatctttgttttcttaattgccggatggttttcaaaaatcaaaaaactcttcccgccagtagttactgggaccttaattacagttattggactaactttgattcccgtggcctttcaaaacatgggtggcggaaatgcccaagccaaggactttggtgatgcgaaaaatcttattgctgcctttatcaccatcctcatcatcgttgtcattgaagtctgggctaaaggattcttacgttccatttccgttttaattggattaattgttggtactctaatcgctagctgcatgggacttgtttcattaaagccagttgccgaagcttcttggttccatttgcctcaatttttctacttcggggtgccagaattcgaatggtcatcttgtttgaccatgatcatcattgccttagtttccttggtcgaatccactggcgtcttctttgccattggcgacctacttcatcaagatatcaccgaagaagacctcaaaaaaggttatcgtgcagaaggattagcacaaatcttcggcgggcttttcaacaccttcccttacactactttttctcaaaatgtcggcttgcttcaattatccggcattaagactaagcgtccgatttactgggctgctggcttattaatggccatgggcttacttcctaaaatcggtgctctagttaccatcattcctgactcagttttaggcggagccatgttggtcatgttcacaatgattgccgtgcaaggaatcaaaatgttaaccaaagttgattttgagaacaaccgcaatattctaattgtcgccatttcaatcgggatgggattgggcgttactgtctatcctcaaatcttccaaactctcccccaaaccattcaattgttcttaggcaacggtatcgtcgtagccagcatctgtgcaactctgcttaatcttttattcaatggaagaagtggtgccaataagtaaaataccttttcatttcataattccatatcataattttctataaatattcacgaacgaccgcttaatgtggtcgtttttcattcttcaccttttaagcaaaatctcttctataatagaagtaacataatttttcaacagtgaggaagtctatgcctaacttaaataaccaaaatcttgatagctacatcatgttttatggtcgacaaaaatgtcagcccgatgaattctttcaaggtgacaatcttcgtaaaaacgatattttttattacattattagcggaactggtacctttacttctagtagacaccacgcagttaaattaaaagctggcgatcttttttacgttccacgcagtcaaacttgttcctttcaagctgaccacaatgaaccctgggaatacttctggattggcctagctggcaacggcgttaatgaaagcatcaaggcatcaaatttacctaataaaaatttcttgcgtcaaattcaaaaaactgccttttatcaaaccctagatgacctttatcaatgtttggcgaagaaaaagaccttattaaacaatttaaaaatttcagctttaacttatcaacttttttatcatctagtaaaagactttcctaaccatccaccagtccgcaaaacacctaaaaatgatcaatatcaaatcgctattaattatcttaatcaaaattataccgatcctacctgcaatattgttgaactttgtcataggctaggagtatcacgcagctttttatatgctttgttcagaaaaaacactaaattatcgccgcaaaagtacctcatgcaattgcgcatggaagccgctaaaaaagaattaattaataccaagcacaatctaaggcaagttgctcaaaaagtcggctacggcgatgaatttaccttctccaaggcatttaaacgctatagcggtgttagtccaaatgcctttcggggaaattaattatattctttgccttatcggattatttttgcatacaatattattaggaaataatttaaacataataaaagtaaaggaatgatccaatgaaacaaacagaatgtactactattttagttggtaaaaaagcaactattgatggctctacgatgatcgctcgtagtgaagacggtggtcgcgtcatcatccctgaaggctttaaagctgttaacccagctgaccaacctaagcactacactagtgtaatttctaaacaaaagattgacgacgctgatttagcagaaacaccattacgctatacttcagcacctgatgtttcaggcaaaaatggtatttggggcgcagctggaattaacgctgaaaatgtagccatgaccgctactgaaaccatcactactaattcacgcatccaaggtgttgacccattacttgatccaagtgaaggtggtcttggtgaagaagatttcgtcactttgactttaccatacttgcactcagcttttgacggtgttaaacgtgtcggctatttagttgaaaaatacggtacttatgaaatgaacggtatggccttttctgataaggataacatttggtaccttgaaactatcggtggtcatcattggattgcacgccgtatcccagatgatgcatatgttattgcaccaaaccgtttgaatattgatactttcgacttcaacgattctgataattttgcttgttcagcagacctaaaggatttaatcgaagaatatcacttgaatccagaccgtgaaggctacaacatgcgccacatctttggttcttcaactattaaggatgctcactacaataatcctcgtgcttggtatattcacaactatttcgatccagactttggtggtactccagcagatcaagatcaaccttttatctgccatgctaatcgtttaatctcaattgaagatattaaatgggccgaaagctcacactaccaagacactccttacgatgcttatggcgatcaaggtactcctgaacaaaagaagaccttccgtcctatcggtattaacagaaactttgaaacccatattttgcaaattcgtaatgatgttcctgcagaaattgcaggtgtacaatggttagcctttggtcctaacacctttaactcaatggtgccattctatactaatatcactactacccctgaagcttggcaaaccactcctaagtttaacttgagcaagattttctggcttaacaagttaactgctcaattaggcgataccaactaccgtgtttacggtgaacttgaagacgcctttgaacaaaagagtttagcacaatgtcacaagatccaacatgatactgacaaagaagcaaagaacctttcaggtaaggaattacaagacaagttaattgctgctaatcaaaagatgtctgatacagtttataacaacactgttgaactgcttggtcaaatggttgacgaaggtcatggtttaatgactttgaaatacgacttgcttgattaataaataaagcaaaaaaataatccacatggaattcacatcccatgtggtttttcattaccttaaattcaactcgtaagctattctacttgaatcaaccggatcttcagttacttgaataatccctcgttcaataaaattatgactaactgcaatgtgctggacaattttatttttccggcttgtatcaattctaaaattgtgaattccttgtgcataagttagagaaataatattgctcaagaaaaattgactcaaatgcattcctctaaacttactagaaactgcaatgcggtgaattgtcgcataggtgtccacattattttcccacttgccttcaatatccgcataagttggctcacggccaattaccactgccgcataacctgcaacttcattatccacagttaatacccaagcacacccatttttaatatcatcttctacagttgctcgattagggtagccactttgccactgcgatgagccactttcctttaaaaaagaagtcgcatcatttaaaatttgcacaattttatccacatctgaattttgtgcacgtcttgtaaaaattaaactcatttgttcacctacaaatcgacatatcattacaaaaaccacacggagattttccatgtggtttttatttactaaatattatctaaaatacccggtacagcaggatcatccttgatagttacatcagctccaagttgacgcagcttttcttggacccgatcataaccacgcaagatattaccagccttgtcgatcgttgttgtaccatcagccatcaggcctgcaatcatcagacaggcacctgctcgaatctcacctgcagttacttccgcaccatgaaactgcttagttggatgggccaaaataatattatcttcaactttaatattggctcccatcttttgcaactgagcaatatgaccaatccgtttaggataaatattatcgattactacaccttcaccgcttttagcagttaataaaagtggtgtaattggttgctgtaaatctgtcgcaaaaccaggataaacatctgtcttcacctggaccatttttaggtcgcccgctgggtaaacatacaaagaatcttcatctgaatcgattactacacccatttcttcaactttagccaggtatgaatcaaggtgttcttcgataatattatgaatgcgaatgccattaccaatacaggcagctaaagcaacataagtccctgcttcaattctgtctggaataatcgtatgaggaatctgtgctttaagctgctccaccccttcaattcgaatagagtcagtaccagcaccacgaataactgcccccatattgttcaagaaggtagctaaatcaataatttccggttcttttgcggcattttcgattatagtctggccctgtgccgtcacactagccataataatattcatcgttgccccaactgatggcatctttaaatggatttttgctccatgcaaaccatcttctggtgcagtaattataatttgatcattttcattttttacgctagcgcctaaggcttcaaagcccttaatatgttggtcaatcggacgtggcccaatatcgtcaccaccagggaagcccactactgccttgccaaagcgaccaagtagcgcacccataaagtaatatgaagcgcgcaaactcttaatcttaccagctggcaacggactcatcttgatatcagttggatctattcttaaagtggtttcaccgaaatcacaatgtacatccatctcactcaataagtccatcaagttaactacatcagctattcttgggacgccttccaaggtcactggtgttcttgataaaattgatgccggaataagagcaactgttgagttcttagctccaccgatccaaacatcaccctgcaggggctttccaccatgaattatcatctgcttcattggcgaaaacaaatccttttctactttcaattaatcataataatgttaaaggatatttacaaaaaaaacaagagctgaggtctctcagttcttgttttcttaagattttgtataatcaaactttaatcactttaaaattcttgtgctggaagaccactagcagcgccaataaatgacttaaataagccttctggacgttgtggacgactcaaaaattctgggtgatattgtgctgcaataaagaattttttctttggtaattcgataatttcaactaagcggttatctggtgaaacgcctgagaagaccataccagccttttcaaaggcttcacggtattcattattgaattcaaaacggtgacggtgacgttcttgaataacatcttgatcatcgtaagccgcacgagtcttagttcccttcttaagagtagctgggtaaatacctaaccgcaaagtaccaccaatattttcttcatcacgcttatcagccataatgtcgataatattattcttgcagtttggctctgcttctgcagaattagcatcctcaaggtttaatacatcgcgtgcaaattcaacactagccatctgcatccccaaacaaatacctaagaatgggatgtcatgttcacgagcatacttaattgcagtaatcattccttcaagaccacgagtaccaaaaccaccagggacaatcaaaccatctgaatccttcatgatttctgcaatattatcttcagttacgtcttcagcttgtaccttatcaacatcaatcttagtgttgtaaagataaccagcatgttgcaaagcatcagtaactgaaatataagcgtcttcaagctctacatacttaccaaccaaggtaatcttagtgtgatgcttcaaggtcttagcacgttcatcaagcttcttccaagcttccatgtcagcttctggctttggactctctaagtgtaagaaatcacagactttttgatccatgccttgcttttggaagttcaaaggcacatcgaataatgaaggagcatcaattgattcaataattcgatcaacaggcacgtctgtaaaagtagaaatcttgtctttgtgttcttggtcaattggttgttcagcacgaagtaccagcatatttggttgaataccaatactacgcaattccgcaactgagtgttgtgttggcttagtcttcatttcatgagcagcgtgaagaagtggaaccaaagtacagtgaatgtacattacattttctggaccaacttcacggcgcatttgacgaatagcttccatgaatggagttgattcgatatcaccaacagtaccaccaatttcagaaataattacatctgaatcagtagtcaaagctgcacgcatgatcttctttttgatcatgtcagtaatatgaggaattacttgtacagtagcaccatggtagtcaccacgacgttctttttccaaaacttcttggtaaatcttaccagtagttacgttagaatacttgctagttctaacatctacgattctttcatagtgacctaagtcaaggtcagcttctgtaccatcgtcggtaacataaacttcaccgtgttggtatggattcattgtacctgggtcaatattaatatatgggtcaaacttttgcatagtgaccttcaagccacgattcttaagaagtcgacctaaacttgatgcagtaatccctttaccaagtgaagatacgacaccgccagttacgaagatgtattttgtcatgttctgctccttttaacttatcctttaaacaaaaaagctcccactaacggggagctaaacgcacatagggtgcccaacaaaaatattatctgctttttcttcttaagtcaagcaaattaattatcttcttcgtcatcatcatcatcatcatttaattgtgacaattgaccttcaatgccatctggcaatacatcatcagtatcatcgtctgtggcgtctaagtcgtcatcttctggatcatcgttatcgtagtcgataatgtcatcatcaccagtagcgctagctaagaaggcattaaccttcttgtggtgcttacgtgaatcgtcttcttcatcctcagggtgattaacttcttcatcaactgattcatatgggaaccatgaacgaagtgcccaaacattttcacccattgagataaattcaccatcagtgttcatattagtataaaattgtggtaaacgttcacgaatttcttcgtcactcttattcaagtatttttgtacggcattaacaatatcggcaaatgccattctcttgccattgtcttccaaaattgcacgagcaacttcgatcattgacaattcatcgcgatttttgtctttaaatttgtctaatcccacagctgtacgtcctctcttatacaatctttactattctactaggcctttaagtaaaaatcaacgtgactgcatagttacctattaagtatagtccattaaagaggtcatattcaacccgaagtttacgtgaaccatcatcttgactctgatattcaagcaagttagtcacgctggtcatgtccatgcggcgcccttcaactacatagcggcagttgcctttttcacccggaataaatttcattaaagaataattattgctgtcaacgccgcggcgaatcaacaattcattctcctttagaagcatcttcactggaatttgcccttcttcggcataagaaattcgtgtgacgtcgccttcttcagtcaattgcccttgcgcatgtcgcgtaaaagtctctgtctcatcgtcttgagtaattttactagtcaaatcaatcgtaattgctgtcaaacaagcgccccctttaaacattattactatatctctgatataattttagttagatataatctattttattatatatagttcaaaaaattaataaattaaacttggtggatttttatgacaagatttcaaagcgaaaaattaaaacaagaggttgttctccgtgatccggttcacggctatattcatattgaagataaagttgttttggacatactgaagtctaaagaatttcaacgcatgcgtcgcattaaacagttaggtcctgttagctatgtttttccaggtgcaactcacactagatttgagcacaacttaggcgtttatgaattaacgagaagaatttgcgatatctttagcaaaaaatatccctcaattacgccaggagacggtctctggaacgatgataatcgattactggtagaatgtgccggattgcttcatgacatcggtcacgggccctattcgcacacattcgagcacctttttggcaccaatcatgaaaaaattggacaaaagatcattactgatcctaatacagaaattaaccatgcattaaaacaagttgcacctaactttcctgaattagtcgccagcgtaatcgctaagacttatcctaatccgcaagtggttaaaatgatctcaagtcaagctgacgctgaccggatggattatttgcagcgggatgcttatttcaccggagttaactatggtaggttcgatttatcaagaattttacgggtaatccgtccttatcaaaatggtatttgttttgccaacaatgggatgcatgccgttgaagactatatcgtgtcacgctatcagatgtaccaacaggtctacttccaccgcgtaggacgctcaatggaagtcatcttgcatcaccttttagagcgcgctcaaactgtttataaaaagggaaatctgcaagttacacctagcttgactaaattccttgaaggcaattggactttagacgattatttaaagcttgatgatggagtaatggaaactaatttttctatgtggacccaggcacaagatccaatcttatctgacctagccaagcgttacttgtacagaaaaccgctagctagtgtccgaatcgatgaagaaaccaaaaatcttttacctaagctcaagagcctaatcaagcaagctggctttaatcctgattactataccgctaccaattccgcattcgatgaaccatatgatgcttataagccaacggggaaaaatgctaatagtcaaattgaaattatgcaagacgacggcagcatgattgagttatcccaactcagcccattggttcgcgcattaaatggtactttccaaggagatgaacgcttcttcttccctaaaactatgctcagtcacgatgaagatcagccgcaaattttcgatccactttatgagcaatttcaaaaatatattaagaatggtgccttaagatatttgagaagaccaaaacgtgagcaaaagaagtaaaattaaggtaaatcctagaatcgaggtatttatgatgaacagaaatgatttaaatacagatgtaagaactcaaattaatccagaagatgaagtaaaggcagaacctaagagcggctatactcaagttaaagacttgatggacacagttcatggttattgcatggactatactaaaatgtcttttgacttcattcatgaaaataaggatttggtaaaagacgtagtcaagattggttgtaaaaccgccatggtagcttgcgttgctggtgccagcattgcgattgccaagattgtttctggcaaagattaaattattatttagctcatgtaaaaaagggatgcgacgcatcccctttttgtgttgcaatatttacctaacttcttcgtcatttaattccaacagtaatgcataaagtgcaccatataagttagaatcattgccatgcttagcagccacaatcaccggcttaatcacttgattattcaacattggattattctgcaaaattttatcaaattgattgttaatttcttcaatcaaaattggctgtgcactaatcccgccaccaataattactttagagccattgattactgcctgaatattgaggatcatgattgctacattgcggcaatagcgtttaaaaacggctagtgctcttaaatcgccattgttaattgcctcaaacgcggtcaagccgttatcaagatcgatattccccaaagccaggttaacttttttgatcatattaaccgcagaacaactaaagccagcataagcagccatattcctagtaccaatacttgaattcgtaatcatccaactcaattcgccagcttgaaaagtccagccatgtaaaatacgattatcaactatgacaccgccgccaacagcagtgcctaaggtaattgcgataccagtattgacgtcatgcaattcgcctagccattgctctgacaaagcagctgctttaccatcattttctacgccaactggtacatcatattttttacctaaagtctcttctaaattcaagccatctaagaatggcaaggctccaccaaaatagataattttattcttagtatcaatcttaccaggagcacagactgcaatgccagcgaactttccttgatacttgtcagcgacttcatacatcgtctgcatgaatgcatctaggttttcagtattagtctttacccggtctttttcaagaatatgcccttcttgatcaattaatgcatatttcaagttagtcccgccaatatcgaatgataaatattgtgtcataattttgtcctctttaaatgaaaaacatctatctctaattatagatgtttctcatgtgtattttaatacactcttatttattataaatggtgatgattttttcaaaaaaaaataaaatgactaacccccggatttaaaattgaagtgcaacactaagtgttaaacaaaaaggccatgaagacctaaacttgaagtgacgaaaaatcaagaaaggaagatctttatgaccaattcaaattctagcatttctaagcactatcatcaattaaccagcgtacaacgtggacaaattcaagcaatgctggattccggcataacttcccgtactgttatcgctcaagaagtcggctgccataagtcgacaatcagtcgcgaaatcaaacgcggaagtgtcctgcaaagagacagcagctatttattgtatgagcactattacgctgatactgcacagatttattatgagaagcgtcgcaaaaactgctatcagcgcaatccattgaagcattatgctgtctttttgagaatgctctccagacgctttaaagctaaatttgatgccaccagcatcgatgaattcgttggtgaattcaaaaggactatgccaggctacccttgtcccagcacaccaactgtctatcgctatattgatcagggcttgctggacataagcaatattgatctgcctatgaagctcaaaagacgcaggaacaagcgtcatcacggccatagcggtcatgctttgcacaagaagcatcttggcaattccattgaacagcgtcctaaagagattgaagacagaaaaacgccgctgcactgggaaggagatctggttaaaggcgtcagacgcaagaatcagcctgctttaatgactttgaccgaaagaaccacacgctttgaagtagttatcaagattcctgactatcgggcaagcacatgccaaaggctgcttcaaaatgagattgacagacatcctgcctggtttaaatcgatcacgtttgacaatggctctgagtttgcggatatgaccaagatcaaaggctgccagatctacttcgcccacccatattctccatgggaaagaggcaccaatgagaactgcaatggacttctgcgtcaattcttccctaaaggcaaaagcatgaaagataagtcagctgcttatgttcaacaggcaactgatgccattaaccgcaaacatcgtcgaatccttcaatatcacacagcagaagaactcttcaagcaatatatttcctcatagcctaactgttgcacttaatttgacaattcaggaaaatgactaacctcatcggctagccattttttattatcaaattttatcttacttgttcttgtcagcttcgtatctggtgttgaacaatgggctaagtgcttcatggttttggatacacttaatagcatcgcccatcaatggaccaactgataccaaaagcatcttgtcaagcttcttctctgctggttgattgattgaatcagtcaaaaccaaattcttgattggtgaatcgttcaatctcttaatagctggaccagatagaacagcatgagttgcactagcataaacttcagtagcacctgcatcaattaaggcttgagcagctaaagtaatagtaccagcagtatcaatcatgtcatcaatgatgatagcacgcttacccttaacgttaccgataatgttcataacttcagcaacattagccttgggacgacgcttatcaacgatggcaattgggcaacctaagaattcagcaagctttctagcacgagtaacaccaccgtggtctggtgaaactacaacagcgtctttctctaagccgttacgcaagaagtagtctgccaaaagtggagcacccattaagttatcaactggaatatcaaagaaaccttgaatttgtggtgcatgtaagtcaagtgaaagaatgcgatcagcacctgcagcttgaagcatgtctgcaaccaatttagcagtaattggttcacgagcacgagtcttacgatcttgacgagcataaccgtagtaaggcataacaatgttaattgtacgagcacttgcacgacgtacagcgtcaatcataatcaacaattccattaaattgtcattaactggcttactggttgattgtacaaggtagacatctttaccacgcacagtttcatcaatattaatttgaatttcgccatcactgaaacgttcaacactagacttggaaagtggaacacccacacgatccgcaatcttttgtgctaatggtacatttgagttaagggcgaagatcatcatatcgtctttataggacataatttcctccgtaaaaatatttaaccagctctattttagcaaaagttgctctaaaaagaaccacattctccttaattatagcaagaattttgccgcaaccataaaaaagcactaactattaatcgctaaaaaagttagaatatatttgtactttctagtacaacgaaaatatcctaaaaaataagacgtagtgtcctttcagatactacgtcttattttatgcatttctagttagttgaagttgctgaagtttgagtaacataatcactaaggtttaaaacttgagtataaccattagtaacaattgtcaaagcaccactatttgaaagttgaattgaactttctggtacattattagcagttgcaaccaattgtacaattgaagttacttctgctggagtcaaattactaatgcttgatacagtgattttcttaccgttaagtttagccttagcgctaacaattgcagcatctgcttcgttaacttgagcaatagtagctgtagcatcgttgttaacagcagtaccatttgtaattgccctatcatatgcagccttggcatcacttgaagcaaacttgtaagcttctgagttcttaacactagttgcttcgttaatgtcttgaagcaacttagtcttatcagctgctgtagcaactgtaacgtctgctctagcttgttctggagtgttaacaggagttaaaatcttaccacttacagcaacgtctgactgctttaaatagcctctaccgcttgataatttatagaataattctggggtagcagttgcagaagttgcaatatatctcaattctgaaacttgttgactttgaccttcgccaaatgctctaacgttatctggttgtcccttaatgttgtaaagtggagcaacattaatcgtagttaccttggttacgtttggatctacagtattatcaccagtatcaacagtagcagcaccatctggttcgttaactggttctagttctgggcctgaaattttacctacattagcagccttaacgaattgattatcaccaatcttgtagtaaagcttagtaccaatgtatcttgcttcagtagctttaacagtcttacccttcttaactgtcttcttcttggtgtcaccgttaccattgtagatataagcattcttcttcatggtaattgaagttgccttaacggttctagttacattacttgccttaacaaaagcagtgcctttcttgtcaagttggtagtaatccttacccttaatggtttcaatgccataaacatcaattgcggcaccctttaaaagcttagacttgccttggtacttgttgatgcgcttaccattcttatcataaatataagcattcttctttaatgagtagtcatattttttagttgattctgcatcatttgaaacagatgattcttggtttgaagtggttttaccatcaatgttaacagttcgtacaaaagcagtacccttcttgtcaagttggtaatacttcttaccgttaatggtttgaataccgtaagtagtgactgaatcacccttaacaaacttagatttgccttggtacttgctgatacgtttaccgttcttgtcataaatgtatgagttagaaacaaacttagccttagtaccctttgacagtgatgaagttgatgacgcagctttaccatctacgttaacagccttgatataagcaccaccaccaagatcgtagtactttacaccattgatagtcttagtgccagttgaagtaacagttacgcctttagcaatagtagtgttttttgcactgcccatgtacttatcaagacgcttaccattcttatcgtacacataagcattacgtaccaaagtgatcttgttgtttgctgccttctttgaagtagtcttcttaggagcagcttgaacagtgttgacgttttctgcagtacccaaaagtggagcaacactcatcaatgcagctgctgagaccataactaatttatgacttaatttcatcgataaatacctcattcttactaaacttaaagttcatttatatattgtagatctaaaatatttttttgccaatttagaaacgaaaaagtgtctttttcctatcaattattacttaacagttacatctgaagctttaatgtaataatgatttggttgcaaagcataatatttaacaccattaatggtcttagtacctaaacctttaacagtgatctttttaccaatgtaactagtgcctaaatagttttttacacgcttaccattcttgtcgtaaacgtaagccttattcttagtagttatcttaactgccttagccactggcgtcttctttgatgaagttttcttagtagtcttttctgagttgctttttttagtagtcttagtggcagtttttttagttgattctttaactacttttttagtgtttttatttgaattagtcttcttaacagccttcttagttgaagtagaagttgttaccttcttgccatcactctttaaagtataagtagtattgcctgacttataagttactgtaccttcagttgcagttgcaggaatccagtacttcaaatcagtttgaatactgtagtaaacttgaccgtcgatattcttgacgttccaaatagtgtagctaccacccttaggagcagtcttagaagttttcttaccattacggtcgacaaacttcatagtcttagttactttgactttgctgtttttaccgtaagtattatgtacgccattagtactcttagtagcagcttgaacagatacagtattttctgccatgcctaatactgggctaacacccatcaaaacagctgctgaaaccataactaacttatgacttaatttcattgtattacctacctcatgtaaaaattattattagtacaccttattgtaggtctcaattattattttgcaataagtatttagcaattcttaacaaaaaagcactagcttgatacactagtgccttattcttaatcccattctttatcttgagaaagaggaagcttatgccaataatctggcttattaacttgacggccacggccaattgccatgtcatatttattaacgtccttagtaacagtggtatcagctgcaataaaggcgtgatctgcaacattaattggagcaatcaatgttgagccagcaccaataaaggcatgatcaccaacattagtatggaacttctttacaccatcgtaattagagaagatcgtaccacagccaatgttaatgtctttacctaaggtagcgtctccaacataagtcaagtgacctactttagtattttcaccaatctcagccttcttaatttccacaaagttaccaatatgtgcacctttgcgaataattgccttaggacgaaggtgtgaattaggaccgatgtcagtattatcgtccatttcagcttcttcaacagttgaagaagtaacagtgacattattaccaatcttagaatcaacgattcttgaaccactagtaatgtagcaatcactaccaatttcggtgtttcctttaatcacaacattaccttcaattacagtgtcgttgccaatcttaacatctgcatcaatataagcagtatcagggtcgataaatgaaacaccatcacgcatatgctgttcattaattcttctttgcatagtcttagtagcttgagctaatgcaatacggtcattaacgccaaggctttcactaaagtcaggcatcttgtaagcaccaacgcgttcaccactattgcgcaagatttctaaaacatcagttaagtaatattcaccttgagcattgtcattattaacgtgcttcaatgcttcaaataattttttattgtcaaagcaaaatacaccagtattgatttcttttacttttaattcttctggtttaccatctttttgttctacaattcgtaaaacattgccttgatcatcacgaataattcgaccatagccaaatggatttggagcttccgcggtcaatacagttgcagcattgcctttttctgcatgatacttgaatagttcattaaatgtatcagttgtgaaaagtggtgtatcaccagtaactactaaagtagcaccatctttgtcacccaattcttcacgcgcagtcattacggcgtcaccagtacctaattgcttttcttggaaagcaaacttagacttgtctgccagtactttttctacatcgccagcacctgtaccaacgattgtaacgatttctgcaggattaacgccttgagctgcatcaacaacatgctcaaccatggttttaccacaaactttgtgtaaaaccttgtacaactttgacttcattcgtgtgcccttacctgcggcaagaacaactacatatttttccattaatattaacctcttaataatcaaaacttgattctagtataccattttagaaacggtcaaaatcagtttcagttaagaagttaccaggttctgctacaatcagcttttgggcagtatcaatttcactaatttttactaatgaaagatagttcttaatcagcttttctttgtcaaaatcggcttcacagagtacacaaacgccggcaatagtaccatcgaattccttaactaattcttccattccggttagggtaccgccacccttcataaaatcatcgacaattaaaactttagcttcttttttaagagcacgagtcggtaattccatcttcgatactcgagacaacgatgaagaaatatagttaacagaaatagtagcaccttctgttacctttgatcgctttctagctgtaacaaatggtacatctaaaaaacgagcaactgctttggctaaagcaatcccttttgtttcaactgtcatgacagcatcgatttcttcataagcataatgagtagctactaattcaccaattttacgtaaatcttgcgtattgcctaaaatatctgacagatacacaaaaccaccggctaaaattctacttggatcctcaatcctagttgataaatctgacaaatatgcttccgcgtgttttttacctaaaaatggaatatagcgcacgccaccagctgcaccggctacagtctccaaaataccatcttgattgctggcaagagtgtgcttcaaaatagctaaatcttctgaaatagatgacttagcagcgccgtaacgcttagcaaagaatggtagtgcaattaaagtatggggacgctccattaaatatttggtcatgtccaccaatctttctgaacgtttcatgaaatctcctttctaatgtttggtttatacttaattaatatactctaaagggcaaaaaaaagcactaacattttaaataaatgctagtgacaatttcaaaaattgtgtttaagcttcagcctcttcagcttcatcatcaaactctaatgcaatattcttagttagtaaatcggtataactgtaagaaacatgtttaaaattattttgatgttggtctaaatcaaccacaaacactgcagggaaagtctctcttagaattccccgtctcttagtaactttcttacgacccgcttgagctactactgttaaagtatcacctaagtgagaatccaacttatgtttaattgtgataattgatgttggcactaaacaacagctcctttagcaacattttatcacaaatatataataaattcaatattatacatcatcttgcaggaataaagctagcaattttaataaattgtttaattgttaattcttcagggcgaattcttggatttacccctaattccgcaaataattcatcacgcttagttttatcaggcaacaaagcttttaaattattattgagtgtctttcttctttgtgaaaaacacattttcactacccaaataaaatgcttacgattttcaattgctggcttttccttcagtggcgttaagacaactacgctcgagtctacttttggtcgcggcataaaggaattatgactcacctgcaaagcaagtttaacattcatttcggtctgaacggaaatagtcaacggaccgtattccttgctgcctggttgggcttctaatcgttctgctacttctttttgcatcattaaggtcaatgaagtaaagtgcaaatctgattcagctaaggcaaaaatgattggcgtagtgatgtaatacggcaagttagctacaactttaattggcttagtaaaatcaaagaagtcactaatatctaccttaaagtccgcttttaatagatctttcaagatcagcttaaagcgactagccaaaggctgatcatcaattttcttaggcagttcattctgtaaaatcgtaggtaagctatcatcaacttcataagcaaaaactttagcacctgccaacagtagttgctcagtcaaagagccaatacctggtccaatttcaatgacttgatcatctttttttatcccagcagcttcaacaatacctaaaatagcagtctgatcaactaagaaattttgccctaagttctttttagctttgacaaagtaacggttaacaattgcttgtgttctaactggagagccaattggaatattatttgtcattttctacctccttgacagctgcctttaattcagctaatgaaacgccaaaagtatgcaagcgattataaaactgcttggaattgccatagccaactcgtaatttaatgcctacttgttcacgtaattttcgtgagccgctaccaccagctaaacctaattgccgataaattgctggagttaaatcacttttttgcggttcaacctcatgcaaatcacttagtgcatgctcaagtgcttcttttgaagcatgttctacacctagactcccctttttatgaggttcgccttccttacgggtaataaaagcttgctttgcatcaggaacagctttagttacaatgcgccggattctttcgccattaaagtcaggatcagtaaagacaataatttgccgactctcacttaatttttggatttgcttcaatacttcatctgaaacggctgatccattagtctcaattgtctcgattcctgggaaaaattgttttaaacggatggtatcgtctttcccctcaacaacgattaccgcatcaaaattctttttatttaagcccataaactctcactgtgttcttataagtagcatccgccactttctctagtggaatatccttcaacttagcaattgcttctgccacataacgtacgtagccagtttcattttgatgaccacgatatggcttaggcgttaaatatggcgcgtcggtttcaactaaaattcggtcaagtggcgcagcttttgcactctcgtgtacttccgtagccttagtgaaagaaacaacacctgaatatgaaaagtaaacattcaaatccaaaaacttatttaaccagtcaacaccaccgttaaaactatgcaaaacagcaccatattccagattgctatttttcaagatgttataacaatctccaaatgcatccctagtatggatatcaactggcatcttcaagtcatgtgctacttcaatttgccgcgcaaaaacattacgctgtacgtcgcgcggcgattcatcccaataataatctagcccgatttcgcccattgcaactaccttaggctgcttcaattgttcaattagtttatcttcagcctgttgatcatagtctttagccacatcgggacagtaaccgaccatcgcatagacattatcaaacctttgtgctaagtcaaccgctctttgattaaagtcaggatcttgccccgcacaaataaccttggttacatcaagtgcttttgctcgttctaaataatattgttccttgccgcgaaacggctcgtcattcaaatgagtatgattatcaatgatctccattagccgagttcagccccaactgcatgttcatcaccaacaagagctaacttaattttgccatgcttttcacttgataagagcatcccttcactaaggtgacccagcatcttacgtggctttaagttagtaacagctaaaacctttttgtctaatagctcacttgcatctggataaaacttgcggataccactcaaaatttgggtttccttgccattaccaaagtccagcttgaacatgagcaacttgcttgagcctttaactggttcaactgacaaaatttggcctacttggatcttaaccttgtcaaaatcgtcaatggtgatttcgtcacccttcttttgttcacttctagtggtcttctttggcttagctttagccatttcatccttgatgtacttaacttcttcgtccatcttaagtcttgggaaaattggttgtggtttttcaattactttaacatcccaatcaaagtcaccaaaggccaaatgcttagcgtcttcattgtcccaatttaaaccaagttgcttgaacataattggtgcagtttcggtcattactggttcaatcataatagcaattaaacgcaagctttcagccaaattgctcatgaccttgctaagttcttcctttttaccttctttgttcaaagcccatggagtagtttcatcaatatacttgttagcacgagaaaccaacttccaaatattgtctaatgcctttgaaaagtgaagtgaatccatattttcgcgataatcattaatgacactagcagctgtatcttgcaagtctttgccaaattcagcttgagcaacgggaactgcatcaacatgaccagcttgatattgattaatcattgacacggttctgttaagtaagttacccaaatcgttggccaagtcataattaattctttcaacaaagtcttctggtgtaaaaataccgtcatcgccaaatggaagagcacgcatcaagtaatagcgaagtggatcaacaccataacgactagtcaatgattctggataaacggcatttccctttgacttagacatcttgccatttttcatcaatacccaaccatggccgataatgtgcttaggaagtggcaaatcaagagccattaacataattggccaataaatagtgtggaaacgaacaatttccttacctaccaagtgaacgtctgcaggccaatatttcttaaacaatgaatcatcgtctgaaccatagcccaaagcggtaatatagtttgaaagtgcatcgatccaaacgtaaaccacgtgtttaggatcacttagaacaggaattccccagttaacagtagtccgggtaactgataaatcttccaaacctggcttaatgaagttattaagcatttccttttcacgtgaatgaggcaaaataaattcaggatgttccttgtagtattccaccaaacggtcagcatacttgctcatcttgaagaagtaggatggttccttaaccaaacgtacttcatgaccacttggagccttaccgccgattacattaccatcatcatctttgtaaacttcagcaagctgtgattcagtaaagtattcttcatcttcaactgagtaccagccagtatattcgcctaggtagatgtcaccttttgctaataatttttcaaaaatcttttgtacggcagctacgtgctctttgtcagttgttctaataaacttatcgtaagaaatattgagactcttccataatttcttgtaagaagccgccatcttgtcgacgaactcttgtggcttaattccttgtgcttcagctttttgttcaatctttaagccgtgttcatcagtaccagttaaaaagaaagtatcgtagccttgactgcgcttgtaacgagccattgtatcagctgcaatagtagtataagcattaccgatcgttaagcgaccagatggatagtaaattggggttgtaatataaaaagtatctttatcagccattgattaatcaaactcctttaatcgtctaaaatatctattttattttaacatgcaaaaaaaggaattgggctaaaaccagcaattccttttaattcaaatcagaatttttctttttttaaatataagtgcttaaccaaagtcgtcagtaaaatgtagattacttctagcaagaagactatgccccaataaccaaacggcaattgagctaggcccaaacttggcgcgatacttgatgaaggcaacattgtaccaataattgccataccaatggtcaccaagaacaccactggcgtggcatgttgcttaaagaatggaaaacgttcatcacgcaaagtgtgaatcaccataattcttgtccaaagcgattccacaaaaatccccgaataaaatagtgtcataaagacccaatgatgataattagaccctactaaatatggacaaatcacataaaacatcaagcccattgcgataaaatcaataattgctagaatcggaccaaaattaagtacaaacttcggccatctcttaatcgaccatttttgtggctttttgacatagtttttagaaacactatcaaagggaataaccagacaacttatgctaaacagcaaatttaaaattaaaacttgcaatggcaaaagaggcaaaaatggcaagagcagcgatgaaacaaccatcgcaattacactaccagcgttagttaccaagaaggtcttaatatatttcattgtatttgaaaagacttttcggcccattagaatcatttcttctaacagctgcaaatctttttgctcaaaaataatatcggctgactctttgataatatcaactgacgtattcgaagttacggtcacatcagctaccttcattgctaaagcgtctttattgccattccccatataaccgactgtatgaccgtttgctttgagtgcattaataatttttactcttaattccggggttattcgcacaaatatatcgcatttttcaacaatttcacgcaactcttccgggctaaccgcttcgatctgggtgccgtcataaacagtatcaacgtttaatcccacctgcaaagcaatagcacgagtaactgcttcgttatcaccagtaaaaatcttgacatcaacataatcttttttaagatcttccagcgcttctttagttgtttcttttggcggatcaagataagccaaatagccaataatggttaaatcatgttcatctttagcagagaactcacctactggggcaggatttaatttataacctactaaaagtacccgtaaaccgtcatcgtttaattcattaatctgatttaagatcttttctcgccaggcagtagttaaatcctcaacctttccattaagttcaaccttattagaaattgccagcatcccttcagcggcacctttagttactaataagtgctgcccgtggtgttcatcgttatctaccactaccacgctcattctttttcgagtgtagtcaaagggaatttcgtcaattttattgtaatcacgctgaatttcgtttacatctagttcatcgcccgcggcatcaattaccgccttatcgattaaatcttttaccccagtttgataatatgcattcaaatatgaaaacttcaaaatctgtggggtttcttgcatatctaaatcatagtgacgctctaaaaccacttgattttgtgtcaaagtcccggttttatcgatacagaacacatcagttgagcccaaattttgaatagcattcatttgcttaacgacagcaccattttgggatatttcccgtgcgccccgtgttaaattggaattaacaataatcggcaacacttctggtgttaagccaactgccgctgtcaaagcgaaaattaagctttccccccaattccccttagtcaggccattaatcacaaacaaaagcggaatcacaattgctgtcgcgataatcaatattttagctaattgcttcatttcccggtcaaacagggtagtttttacttttttacgggaaatagcctgaactgctttgccaaaaacagtgtgattgccaattgcaaaaacaatcccggtgccagagcctgaaacaatagttgttccctcatatagaatattagggtagttcaaataatcattagccatactcggcttaattactacattagccatcttttctgccggctcaggatccccatctaaatagcttgatgagcaaaaaagatctttgctagttaacaacttcatatccgctggaatcatatcaccagccgacaagttaattacatcaccaaccactacttcatctgttggcaattccacatttttgccatcacgccggatattcgttgtaactgataccatattgagtaattgatcagttaccttagcaattctgattttttggataaaattgacgagaaccgagataatcaacatcacgatcatcactatcgtagtaattaagtcattatctccttgtggcaccaaaatatagctagtaaacagggttaataaagttaatactaataaaaccaacgtaaatggcgtagcgattgattcccataataagcgccatttagaggaattgctattagtaatgatttcgtttttgccatattctcttctgttttcttcagccttattagtcgaaagcccttcagcactcgcctgtaaacgcgccagcgtctcgctacgtgactcacgcgcaatccgttgaatcctttgaatgtctatattcgatcgcttcttgctagctgcttttaacattatttgctcccttctttaattgggacaagcaaaacaaaaaagccacctgtaactctgcaggtgacttttgccaaacaaggctctgtcatactcgtcgttcagttttaacactacgtgacgtaagcacatgctagctatctggatctcgccttaagtcgacgacacctatttaacccgttggcatctctggatgtttctgggcgatagcgtgtgttcacgtaggagtctcacctaacagtttttcgctaattatgtctataaaaagtgtaaggacaaaatgcaaataagtcaagccgactatttcttagaaattggatcacgatgactaaatctacgcaagaaataagtaattcccgtaattaaaaatgccagtgccagtgcgattggtaaagctacactatgtggacgcgcgactttattttgttctgcttgcgtcaaatcatatttatcaagtgcatattgatattgttgatcaactctagtcgcacatgcccgaaagacgaagcgaattcccttgttaaaagttgcattattttgactacgcaatttatctacttcagcacgcaagatattgccccgagcgacctcggtgaaggcactatgcaaatctttagttgaataaatttgcacattacgctttttacctttctgtcctaccacaataaagaccgttcgcttagaatgatctagcatcttaggtgttaacttattcagccttttaaccgttataacgacaatttgcggttgttctttagtctgaaaatagcgattatttttttccgtaatcaaagtgcgagtttctttatctaaaatatgagcatgatcttcaatatttggctggacaaatcctgtcgttattaaaaatacagttactagtcccattaaccaaattaaattaattctcgtcttcttcaagtttatgggccaagctttccacgtatttgcgattaatcttaatctgttcataaggcaccccgctatcatgaagtagttgcatcgccaatggattatcgcgatagtcaaaataatagttaatttttttcacgcctgcctgcaacaaggatctgcagcaattatagcaaggaaaatgtgtcacataaatctcagtattttctgtagaaacaccaaacttagcacactgaatgatcgcattcatttctgaatgaatagttctaacgcagtgaccatcaaccatttgatgacccacatcgtcacaatgcggttgtcctgaaacggaaccattataaccagtgccaataatccgattattttttactaagacgctaccaactaatgcgcgattacaagtagagcgttgcgcaattactagcgcctgcatcataaaatattgtttccaaggaattcgatcgtgcataactttacctcagccttatctattcttgaaatagttcaaaccaattgcgtcacggacttgttcaagtgttgcattagccactttattagccttttttgaaccttccagaagcatttcataaaccgcatcttcatcttgagcaaacttttcgcgacgttcacgaattggtgcaagctctgcttcaaggaccttgtttaagtaacgcttaatcttaacgtcacctaagccacccttttggtattctgccttaagttctgccaccttgtccttatctggatcgaagacatcaagatatgtaaagacagtgttaccttcaaccttaccagggtcttcaacgtgaatatggttaggatccgtgtacattgacataactttcttttgaactgtctttgcatcatcagcaagataaatcgcattgccaagtgacttcgacatcttcgcattaccatcaagtcctggcaaacgtccttgacctttaggtgggaaataacctttaggttcaaccaaaacatcacaattataaacacggttaaaagtcctaacgatttcacgtgtttgttccaacattggttcctggtcatctccaacaggaataacggttgctttaaaagcggtgatatcagcagcttgagaaactggatagtttaaaaagccaattggaatagagtctttgaaatctttttgcttaatttctgtcttaacagttggatttctttcaagccgagccacagttactaaatccatgtagtaagcagtcaattcaaatagagcaggaatttgtgattgaacataaatagttgatttagctggatcaataccaacagctaagtaatctaaagctacttggatcaaactattgcgaattttttccggattacgagcattgtcggtcaaagcctgtgtatccgcaatcataatatatggatcatatttacctgaattttgtaattttactctattctttaatgaaccgatatagtgaccaatgtgcagcttaccagtaggacggtcaccagttaataaaatttctttcgccatctttttgctcttttctaatttttaagtttatttttttattaatattaattgtttaattacctaattttaacaaaaaataggctatgattaaactagccctaaagaaaggaaatgcgtatgtgcaaccagtttcgtttacctaatttaaaacaaattcaacaatatctcaaaagcgatcttgacctgcccttagttacaccaaattttgacattcaagcacaagatatttttcctaaccaagtagcacctgttttgctttatcaaaatggtcaattgcaattaaacaacaaaaaatggggctatccaagtcccgttgatccaaaaaagccattatttaacgctagaattgagcgattttatgattcagcgccttcaatgtgggacaaatcctttgccaagcaacgttgcttaatcttaaccgaaaaattctttgaatatgctaaaactacccatattgctgaaaacggtcgtaaataccatgatagctacgccttccgcactaatcaaccacttaccttaattgcaggtatttatgatcaggattatttttcaatggttactaccgcgcctaacaaagatatggcgccaatccataatagaatgcctctagttgttatgcccaacgaactacgccgctggctttttcaaaattttaccagcttaattgatcgtaaaagtgttgatcttcaaatagaaaaaatgctaaaataaaaacatattgcgggtatagttaaatggtagaacgacagcttcccaagctgtagatgcgggttcgattcacgctatccgctttttttatacaaaaataaggatgagaatttttctcatccttttgtttttaaatcataatcactgtaagtacgccactaactacagctaagtaaattggcatcaataatgtttgtgtgtacatatagctccaagcaaacaccatgccataaattgcatcaataataaacagtactactgaattttgaaagctcagtaagctataaatcagacctgaaacaatgatccccataattgcaacttgcttagtatttcgccgaaaagcataattgaacaaaaagccagtcgccaaaaattcttgtaggattggtaatacaattccttggacaacgattaaaaaccaaaacatgttaactgattcacttttggcatatatcaattggaaatcataatgactaatcctgccatatgattgtaagtatgaaatcgaaatctgtgtaactgtaatcactaatgttaatagaacaacagttgacaaactgcccaaccatggaagtttaaaatcacgggcaaaaaagcgttgctctcgattgaaacgataaacataaaacaacagaatcatggctgcaactaagccgaataaaatcaaatcccaaatatgaaccggagattttctagtaactagctttactactgcaaacacagcgacatagccagctaaataaacggcatagcggatcacattaccctctcttgattgtggcgtattcaaattcttcactcctactctgaattgtatcctacaaaacccatattataccagaaaaagacagtttattatagttctcaacttatttagtaagtgtcaatgtttttgcggtagcctttaaaccattagtctaaccttaatttcttaaatatttatatgacttaaatttctgcttagcttgcttaaataactattgccagctacctgtgcggttaatgcgccatgctggatgcctaaatgaacttcatgacgcttctttaagctgtcacgggccgctgcttttaattcctgttcagtcaatacagttatttctgaatcttcaaactcgctgctaagccaaaattccagctctcgattcttgatgcagcttaagatcctaagcatgccttctgctccagattttgaccatttcttgccttgccccttaacacggtaggtatacttgcggtggttgctctcgcagcagccaatggctttagtcacagtcagttttcgtttcttaaacggcttaatatcgtcccaatgacgatcaatataattccttaggcgccccagataatcatgattgagctcggtattcaattcatcaattagtcggctttctgcagtggttaggatagttttaactttgtcatagctgtatttgtattccaaagcagaaatcagcttgccttgcaggtcaggcgcaaaatatagcctttctttgattttcttatttaggtgaaagacatccaagaaatgctcatgacgcttgcatagccctacaatgtcatcgaagtctgttttggcatatccagcaccgccatcggcgttgctaagaattacagtatcagaaagatcataagtattggccaggtactccttggcttcgttcagcgcatcaagtcggcttaaagaaacaaattccttggcattgattcgctttctgcgtttcttgcttatattgacaatgccttcacagacctgatagcgatgaaattccaaccggcttttagtgcctttgatcaccacgccatcgccttcaagatacaaaactgggacctttttcttagtgcctgcggcatcatatcttgaatctgcttcttggcccgctttaatatttttcccggccatttttaccaaattgcccacctgcatatggctaatattaaagccagacaggcaattgactgctagagcagtattgcgataagtggcaacgctgcttacttctaagatgtttttgactgctaaaatactgtagcgcttgtatttgtaaaagcccattaattcatccaagggataccttgcttgtttgcctgggcagacatatcttcttctgacatacctaacttcgccaaaagccatattgattgagcgctcattcttcttatcaatctgatagccctgtgctttaaccttggtaatcatttcatcatcaactttagctaaagccaaggccatgatttccttaatcaggtttaagaagaaacagattatttttctttcacgcttaatataattatcttcagactttataatatttgcgatttcagttacaattgaattcataaaagaccagcttctaatgtgttttttgttcttaacatcagactactggtctttttgtttgagctcaagtccaaattcaaaggacttgggcttttttaattatttattcaacttaccgtaaaaaattatacacttagatactttaattgtttgcctaggtaacgcagacgactttgtaagtgacctagatcacgttttgcttcagtatattcagtattttccgaaagatcacctaaagctcgtgcagcctgcaaaattttaattctacgtggccgatctttttttaatcgagcaatttcatcctcaatttgttgatagccttctggtgtcattttctaaaaatataccatttctatttcacaaactttctttatttttctatacgtaataattatctacaatctcagaatgttattgtagcagcgttatcagtctaaaattagcactataaatttttgagtgctaatttgtgtcatttctataaaaagcgactacaataaacagtgtaaggagaaaagagatcaagaaatgagttgatcttttccttatattctaattaagcaaatacaaaaatgaaaggaagttttatttatggcaaacaatatgatgaatcggcgcaacgacatgatggatgcaatgaatgattggtttggttttccaagaaacttctttgacgataatgaaattgaaaacattatgcaatctgatgttgcagaaactgataaggactatctagttaagattgacatgcctggcatggataagcaggatatcaacgttaactataatgacggtacgttaaatgtcagcggcacaagaaaatcatttaaggacactagcgataaaaatagaaatatcattcataaggaaagaagtgagggcagtatttctagaagctatagattaccaaatgtagttgcaagtgagattcatgcaaagtatgataatggtgtattgaccatcactttgccaaaggaaactgctggcaatgatggcaattctatccaaattgattaatttattagatataggcaagaaatctaataagttgacggattaataattctctcaagcgagttctgattgaacccgcttttgttttgctttaaaatagaattaaattgagaaaaaaattataaaatgaaaaggagattttttatggctcatgaattaactgtgcaggaactagaaaagttctctgccgaatttaataaaaaacctgaaaataaagtcgttgctcgtgcagctcaacgcagtggtgtacttgaagcatcttataatgatcgtgttcaaggacaattaacccgcgtcttttcaactgaacttgatacaaataatgtcactaaccaaaaacattctggtcgttgctggctgtttgcgactttgaacgttttgcgccacgcttttggtaagaaatataaggctaaggacttcaccttctcacaagcttacaacttcttctgggataagatcgaacgtgctaacatgttctacaacagaatcttagacagtgctgacatgccacttgattcacgtcaagttaaggctgacttagactttgctggtagtgatggtggacaattccaaatggctgccgctttagttgaaaaatatggtgttgttccttcatatgcaatgccagaaacttttaacaccaatgatacaactggttttgctactgctttgggcgataagttaaagaaggatgctttagtattgcgccacttgaagcaatacggcaaagatgatgaaattaaaaaggttcgcgaaaaatttttaagcgaagtttaccaaatgactgctatcgcagtaggtgaaccacctaagactttcgatcttgaatatcgtgatgacgacaagaaatatcatttagaaaagaacctaactccacttgagtttttacacaagtacatgggcgacgttgattttgatgactatgttgttttaaccaatgctccagaccatgactataacaagctttatggtctaccagctgaagacaacattgaaggctcactgagaatcaagcttttgaatgtaccaatggaatacttgtccagcgctgctatcgctcaattaaaagacggcgaagctgtttggtttggtaacgatgttttacgtcaaatggaccgtaaaactggttaccttgacactaatttgtacaagttagatgacttattcggcgttgaccttaaaatgtctaaagcagacagattaaagaccggcgtcggtcaagtgtcacatgccatgactttagttggtgttgatgaagacaacggcgaagttcgtcaatggaaagttgagaactcatggggcgataaatctggtgttaaaggcttctacgtcatgaataatgaatggtttaaggactatgtttacgaagttgtagtccacaagaagtacttaactgaaaaccaaaagaagctcgctgaaggtccaatcactgacctaccagcatgggattcattagcttaacgagcaatgatcatataaaaaggcgatccatatcggatcgcctttttagcataaatataatattaatatagagagagttgcattagatttggtatctaattttcgtagcttgccgctacttcttcgtaatgcttgacttcatcgtcagagcagcgtacgaagtgtcctggacgaatttcatgcattgagcgttgctttccgtccatttcttctttttgagcgtcataaggaatccttgtccggctccgctcaacttctggatcaggaattggcactgcagaaatcaaactcttcgtgtaatcatgaagtggtcgatcatagacgtcatcggctggacctacttccagtagtttaccgtagtgcattacaccaattcggtcagaaataaacttaaccattgataaatcgtgggcaatgaacaagtaagttaaaccacgctttttctgtaattcaatcatcaagttaactacttgagcttgaattgatacgtctagagctgaaataggttcgtctgcaacaataaatttgggctctacggctaaggcgcgagcaatcccgattctttgacgctgaccacctgagaattcatgtggaaaacggctagcatgacttgcatttaagccaacagtttccaataattcctctactctctcagttcgttcatctttatttttaaccaaatggtgaatatctaatccttcagcaataatgtcctcaacagtcattctaggattaagtgaagcataaggatcttgaaagatcatttgtgcatcccgtgtaaaagctagtttgtctgcacgactttttaaatctgctacatttttgccttcaaaaatcacttcgccactagttggcttatacaattgcaaaattgagcgcccagtagttgtcttaccagaaccagattcacctaccaagccgaaagtttcaccttcatagatattaaagcttacatcgtcaacagccttggtgacattacgaccatttttaaagtattgttttagatgttttacttccaaaattttctttttttctggcataaaaatctcctttaccgcgactagttaacctctggcagtttatcttcttgtttcatcaagttatattttttccagcgacgtgtaatttcagctggtggttccactttaggtgcacctggtgctaaaagccaggttgcagcatagtgagtatcagttaccttgaaaaatggtggctttctttccacatcaatcttcatggcatacttatttcttggtgcaaaaggatcacccttgggcggatcaagcaagttaggaggcgtacctggaatcgactccaaagtatcactgtttaaagtaggcattgaattgattaagccccaagtatatggatgctgtggatcataaaaaatttcatcaacaccaccgaattctaagaattcaccagcgtacattacagctactctatctgccataccggccaccacgcccaagtcgtgcgtaatgaaaataattgaggtcttaacccgcttttgcaagtctttcatcaagtccaagatttcagcttggacagtcacgtctagagctgtagttggttcatcagccagcaaaatctctggctcacaaattaaagcaatcgcaattacgattctttgtctcatcccacctgaaaactggtgaggatattgattaattcgttcttctgcatttgggattcccacggccttcatcatttccaaggctttagcccaagcttctttcttagaggcacccttatgtttgattaatggctccgcaatttgctgcccaatcttcatagttgggtcaagcgaagtcattggatcctggaaaatcatcgaaatttcgttaccacgaattttttgcatttctttttcagataactctagcaaatttttgccgtggaaatcaatctcaccgtcttcaatctgagcatttcgtgctaacagaccgataatacttctggtagtaaccgacttacctgaacctgattctcctacaattgcgagcgtctctcccttatttaggtgaaaggaaacgttacgaatagctttaacctcaccagcataagtgtggaaatcaatttttaaatttttaacatctaaaactctttcttctggcatttaggttaatcctttctatctttgtccccgtggatcgaaggcatcacgcaaaccatcacctaataagttaaaggcaatcatcaacacacacaatacgattgctggataccacatctgatatggcaagaattgaaaattcttttgtccttcgttcaaaagtacacctagtgaagtttctggggctgaaataccgattccgatgaaacttaagaaggcttcgaagaagatggcagttggaatagtatacatcgtttgaataatgatgatgcttgaaaggtttggcactaagtgtttccaagcaattttccaaggtgattcacctaatgatctagctgccaaaacatattcttcatttttcaaactcagagtttctgctctaacttgccgtgccattgtcgtccaacttgaaatagcaattgccaagataattgacttaatacctggttttaataccaccaacatcaaaactacaatgattaaattaggcacggaagagataatttcgataattcgctgcattacgttatcgactcccccgcctttccagccggacactattccgtacgcgactccgatagttaaatcaaagaaagctgcaactaaagcgacgatcaatgaaatctttgtaccatagataattctttgtcccaaagatctgcctaaataatctgtacctgcgataaaatacttatctttaggcacgccattctgggcataagcatcaacccacttgccattttgcttaatcttaccgttcaacccgttaattgcgctcattcctggcactttagcaggtaaattggcatattgtgggtgcgatttaactaaagtagatttattgatgaatggggttgaaccaaaagctactacaatcatcaaaataacaataattgcagaaataatagctgcttttctctgcttgaagcgaagccaaacattttgtgcaaacgataaagatggacctgcaatgttttcgttatcctgtgcttcatcttttggtaagggttcaaaggcatctgcaggaaggtttaatttttcttcagtcatattgtcttctaggcctcgctttcatctaatctaattcttggatcaattaatccataaacaatatcagtaatcaacagaattactactaatccaatacagtaaaccatcgtaattcccatgattgttggatagtcgttagtcaaaatcgacttaacaaattgttcaccaatcccaggaacgttaaagatattttcaataaccattgaaccagtcatcaaggctacagcataaggaccaatcagagttactaatggaatcattgaattacgcattgcatgttttctaatgacttccattctacttaagcccttggccttacctaactcaatatagtcactacttaaggtatcaaccatactggttcggataaaccgagctgtttccgcaaatggtccaactgccaaagcaatcgttggcataatcgtttgagaaaattgcccccaaccagcaattgggaaccaacctagctttaaaccgatgtagtattgaagcaaaactgctaaaacaaagttaggaactgatttacccaaaatagaaattacagtagcagttgagtcaacccaagtaccctgtctcatagcagcaattgccccagcgattacaccaaggacaactcccaaaattaatgcttgtaaacctaattgtactgacgcacccaaacgcgccccaattaatgaagctaccggttggttactatattggaaggatgtcccaaaatcaccgtgaagcatccccgcaatataaatcaaatattgttgccagataggtttatttaaaccatactgttgatccataatttgccgctgagttagcgtcatctttgcttcattagcataaggtgaacccggcatcaatttcattaagaaaaaagttaccgtagccacgataagcaaagtgaggatcatataaaatatacgttttaataggtatctagccatattaattgctccctcattttattttatgctttcatttactttttaatgttgttttaattataccaaaagaaataaatatatctagttaaaatgtccaaaaaattaaaaaaataagagagaaattttgctttctctcttatttttaacttttattatatctattttgtatagtttggagcagctttggtcatttgaacatcatgtggatgtgattcacgtaaacctgcattagtgatttgaacaaattgagctttatcaattaattccggaatatttgcagcaccacaatatcccatacctgaacggagaccaccatcaatttgaaagactacatcagaaacatcgcccttatattctactcgagcttcaacaccttctggaacaagtttattagcttcgtttacgccaccttggaagtaacggtcacttgaaccgtgtgcttgggccatcgcaccaacagaccccattccgcgatagcgcttatacttcttgccattatcttcaaaaatttcgccaggtgcttcagtagtacctgatagcattgagccaagcatgacagcattgccacccgctgctaaagctttaacaacatcacctgaatatttaattccaccatctgcaatgattggcttgtgatattcacgtgcagctgtagcagcatcataaatagccgtgatttgtggcacaccaacaccagcaacaactctagtagtacaaattgatccagggccaataccaactttgacgacatcaacatcagcatcaaacagtgctctagttgcatccccagtcgcaacattaccagcaatcaaagttgcttctggaaaatgatcgcggatttctttgatcttgcgcaataccccagctgagtgaccatgagcagtatcgataacgatcgcatcagcaccagcttcaagcaatgcttctgctctttcaaaagtatcactggttacaccaactgctgcagcacagagcagatggttttgatcatcagttgcggcctttgcagcactagttggcacaactacgctctttacgttggctacttcaccagcttgcgcttgaattgacatattcttgtgcacaacgcctagcccaccttggagagccattgcaattgccattgcaccttcagttacagtatccatccctgcactgatcaatggaatatttaatttaatgttatccgccaaagtcgtactcaaatcaacttcgtttggcaaaacatgactttctgctggaattaataaaacatcatcaaacgttaaaccttttttagcgaattttgtatcccaatttgacatttaagctctccttttctcattcaaaaaattattagttttactttactagcctaacttgcttttttcaagcgaaaatcaaaaagcagaccgattttttccaatgtcattaagttaagacattgacaattaagggtgcttttttagagatcgaatcatttggattcgatctctttttttgtataaaataaaggcgaaaagaccagccttttcgcctatcttatatattatatattttaaaccttcaaaattattgccagaaagatggtgttaattatgaaagcccttcataagaatattctagaacgtcttgatcaaattatcaataatactggggatcatattcacgattttattaataatcctcatgcttttaccaggaaacgcactttagatgcagcgacagtccttaaaactacaattaacatgcaaggtcagaatttaaacagtgaactctttagagcttttggcgaagatgcaactaaaaagaacgataaagtagttagtacttctgcctatgttcaacgcaaaagccagctttctcctgcttgttttaaacatattctgactgtttttaatcaaaatctatttaatattcaactttttgatcatcactaccgtttgtttgccattgatggctctgactttaatcaaatctggaatccgaaatcgaataacattgtacaagcttcttctcataaaaagaaaccctattgtcaaattcacgttaatgccttatatgatctattgaataatacctaccaggattgtatttttcagcctaaatcagaaatggatgaacgcaaagcggctgttcaaatgcttaaagctttgaattgtggtccatatattgtaacaatggatcgtggctacactagtttcaatatgattgaaaactgcaatcgcctgcctaactgtcattacataatacgaactaaggctggacaaggcggagttaaagaaataacgacattgcctgatcaagaatgtgatcgtgagatttcctgcctggtaactacttctaactattactacatcacgcataaagccagtgagaatattcaccatgtccagcatcattatcgccaatatattaagtatcgctctaaaaatacccaggatctaagctgggattttggcgagttatgcacaataaaatttcgagcctgcaaatttagaattaatgatgccaaatcaggcaaagaagaatgggaagttgtgctaaccaatcttgatcgaaaaaattatccgctaaaaagaattaaagagctttatcatctgcgttggggtattgagacctccttcaagaaattgaagtattctttaggcagtgtacagttccattccaaacaagataaatttattgaaatggaaatttatgcccatatgattatgtttaatgcaatcagtcaaattgatgcacaggcctatattccgcaaaagcattgcaagtatcaatatgccatcaatttcaagcaatcatgcttgattattcagagcatgtatttggcttcttctttaacgcaagattttgaacggatccttattcagatcagctattataccattccaattagaccaggccgcaaggacaagagaaatattaagcccaaatcagctgtatattatttatatcgcgtagcttaaaaaagcagaatctgtgctatgccttatttgttgtacgaaaaaagcaccaatttaaccaattaaatgttaaatcagtgctttaaaagtctaatattaattgtcaatgtcttaacttaatgacattggattttttcggtctgctttttaattacatagaggagttgtttattgttataagttctattatttagatatttaggattttagtctacttttcaacataagcatatttgaagttatagttagctccagcaccattatatacaacgcccttgacagttggacgaaccatccaagcttctgctggctggtaaagtggtactacaccttgctcagttaacaatacacgttcagccttagctaagtcttcaaaacgagtattttcgtttccagtagttttagaagctgctacatacttatcatattccttattagcccacttgccccagttgtatgaagcatttgaggtgttcaagtcaaggaatgagattggatcagtaaagtcagcttgccaacccatcagtaaagcatcaaagttaccattttgaccacgaactaaggcagtctttttaggtaaactatttactctgacattaacgcctttcaagtttgactcaatagtactttgcaagtattcacctgcttttttggcatcatcatcgtcataggttagcaaagtgaagttaactttgctctgtcctaaagccttttgtgctttcttccaataacttttagctaaagtagggttatatgtcattaacttatcagtttcagcagttttgactaattcagtataatctttgccatttacttcagtcatactatttggtgaaaaggtagtgactggcttgttagcaccacctacagctgaagctaatgccttacgattaaccgataatgaaagtgcacggcggaagtcagtattttggaaaagcttgttcttttcgtttaattgtaaatattgtgttgaagaagctggtctaattgtataaccactctggttcttcaattgttttgtagcttgtggtgccaataatgctacatctaattttccagattgatacaagttatagtcagttgatggtgtcttttgcacgctgtaattaatcttacttagttttaccttgcctttgtcccagtaatctttatttttaactagcttccaagacaagtttgaaccggtccagccttttgatacaaatggtccgttataaaccattgttttagatgaggtaccataatttttgccatacttttcaacggcatgttcattttgagggaagaaaaccccgaagcccatcaatagcttaaagtatggaattcttctatccaaagtaacggttaaatgttggttatcatctgctttaacaccgagtgtttcaaccttcttctttcctgctactacatcatccgcattctttactcctgagaaaagataagcatattgtgaggcagtctttggatcaacagtcctacgccatgaatagacgaaatctttagcagtaactggatcaccattagaccatttggcattctttctcaaagtaaaatgccacactttaccatcctttgatacctcagtcttagttgccaaagcattttccaccttggaatttttacctaaacgatagagtccttccatcgaattattaatttgatctaaactagttgcatcagtcaccttggacaaatctaaagtttgtaattctgatttagtcatccaattcaaggtttgcttggtaccagatgacgaacttttatttgaacaggctgccaaagttgcagctgatacgacggttaataaacttgcactaaaatactttttccactttttcattttgaccctcattcttttttattacaaaaaggagcaaccttcacatggttgctccttctatctattcatcaaatcatagctagactattattacgcaattacaagtgaagagagattatttttatgtcttgtttgtaaaataataattgctgaaataataatcattactatgtcctcctgattttttaattaatttgctacataagtattcttgaagttgtagtttaagccagcgccattgtagacaatgcccttaatgtctggacgaactaaccaagcttcagtcttgtagtaaagtggggcgattccttcatcgctaagcaagatcttttctgctttttcaaggtcatcccaacgcttagttgtatctgctgtagtcttagaatcagcgatcaacttgtcgtattgggagttactccacttaccgttattttgtgcattcttgctagtaaacaagtcaacgaatgaaattggatcggcaaagtcagctgaccaacctgaaacaacaacatcgaagttaccactagttgaacggttcaaacgagtcttgaatggtacgttagctactgaaaccttcatacccttcaagttttcttctaattgactttgaagtgtttcagtcgtcttttgacctgaatcagtatcatcagacaggattgtaaatgaaacgttcttaacgcctaattccttcaaagccttcttgtaaagtttcttagcttcagttgggttatatgcggcgttcttcttatcaccaacaacttctgaccagtccttaccatcatggttaactacaccctttgaagttaaactggttgctggggtattagcaccacctaaagcacttcccagtgcctttctattgattgacattgagattgctctacgcaagtcagcattttggaaaatcttcttcttttggttaaattgcaaatagaaggttgctgcagtatcacgcaaagtgtaacccttttgatgttttaagttcttagtttgttgtgaatctaaaatagtagcatcaagcttatttgattggtacaagttgtaagctgttgatggtgtcttttgcacgctgtaattaatagcatcaagcttaacattcttcttgtcccagtaattcttgtttttcacaagcttccaagaaaggttagaaccagtccagcccttttgtacaaaaggtccgttgaaggctgtagtcttagatgaagtaccatacttagagccattagcttcaaccaccttttggttttgtgggaagaacaatgggaatcccatcaataatttaaagtatggaattcgtttgtctaaggtaacaactaacttattatcaccttcagcctttactcccaaactattaactggtgccttacctgcagaaatctgagtggcattatgaattccttcgaagaggtaagcatattgtgaagccgtctttggattaacggttctgcgccatgagtaaacaaagtctttagccgttaacttatcaccattagaccacttagaatcacgcaaggtgaaagtccaggtcttaccatcttttgacaccttggtatctgttgccaaagcattctcaactttagaattcttacctaaacggtataaaccttcttcaacgttacccaattggttaaaactggtaacgtctgttgccttagaaatgtccatcgttggaatttcagccgaatccatccaattaattgttttcttagctgatgaacttgacgaattagaattactaccacatgctgctaatgttgagccagcaatcaaaacggttgctcctgcagcgaataacttggtaaacttcatattattgctcccctcgtttatgagaaaattaatagaactctttaagttgtttataagtatagctaaatattttttgctttgcaagttttttttaatattatttttaatttatttaaaaaataagcctcaatgctgatgtatcaaggcttattcaaaattaaattattctaaacattccattcttgcataaattcacgtacaaagtcgcgcatgtatgcagttcgtctttccgcttcttttttggcagcaggagtattcattaaatcttctaaatgaaaaagtttctcataaaagtggttgattgtggtttcgacatggttacgatattgatcatgactagttaaaacggctggcttaatctctggatcgtaaatcttattgccatgtttaccaccatacgtaaaggcacgggcaattccaatcgcacccaaactttctagacgatcagcatcttgcacatattgtccagataaaggcaaatgatagtgatgctcaatattagctgaaaatgacatgtgttgaatggtgaataaaatatcccatgcctccagttcattaaaccctacttgcggcaataaaactttaatttcatcaattaccttttgtgggtcagcacatattttttcatcaatcgtgtcatgcaaataacccgctgttttaataatagcaactacccggctatcttcatgagcatcagcatgatctgctaaatacatttgactagccaaattagctacacgttcgccatgataaaaatcatgacccgttttttcattctttaagtgtgtttgagtaaaatcgataacttgtttaatttccattatgccattgagtcccatgcttttaccggcgttgctttgccttcccaaatcttaaccagtttttccggtacatattgttttttaacaactactttgaagagatattcatcaaaccagttatcatccatcacaaagtagcctttttcaccgaccttgtttccccatgagttttcaattttccattgacgtggctttccattaacaacatccacaccaaccatcgtcatggcatgagttgaacccgaagcaccagtttccagtctctcttttttgcttaacttagtttcaatattaaaaatagcatcagtttgatagaggttatgagctaaaattcccttttgacgatcgctatctttacctacatcacaaccaaaccaaaaagtttcgcctgcttcaagttgcttaatcgcagcttctttaagattttcaattttagtgtttaagaaatgaactggacttccgccctctacattgtcttcaaatggcaaagcatacagcttatcaaattcatgatctggtgcattgaacaaaacaatatagtcatccaagtcatcagtaaagtagtcgtgaaagaaatcaagtggagtaagatcaccatcaaaatgatacttaccttcatcatccttaaactcaaggtcaaatttttgtactggttgaccgaaagcaattactgccatacggtaaacctcactcaaaaattcttgacgtttagcttcaatttcatcatttttacctgcttgagctaacttacgcaacacaagtccatcttctcgcaacttattattcaaaatacgattgaagaaagcagtattgttggcagtgaaactttcatcttgagcataggttggcactaagccgtacttcctaatcaaagaaacagccatagcccattggccaccatcagtatcaggtccctgcatataagtatgcactgttctgtcactaagtggacgatctgcggtattcaaaatattatcaaagaaaatatttgctcgttcaattcgatcccagaagaataaataattttgtgaaaaagtaaagtttttagcattatacttcttagcaaaaccatgacgcaatgtattcaaggccgcaaatagccagcagcgacccgattgcttttgatcagtaacattatcagttgggatttcaattgaaaaagtgcggttcaatttcctaaccttttctgaatccaaactagccttagccacaccattattaacaacagccaattccgcaacccgattttgtggtttttgctcatattctttttgaaatttagcaatttcattcattgtaagttcatgcttcataaaatttttcctttcttgccaaaaacaacaactaagccgcttcccaggtttgaactggggacctcctccttaccacggcggtgctctacctattgagctaaagcggcgtcttcattataccaaaaaaggcgaagacattcatttgaacatcctcgtccttatttattctctccaagtatttttagaaaataagtattcaaaacggttattaaatttgcttttatttagttcttaacgacgtctttagtattcaaccattgactcttgttgattctaacaatcttctttttattaaccttcttaacgtcttttgcggtataagtagaacccattgcaacttttttgctagttttttcagcatttttattgtaaacagctactttttgatttttggtgtctttaataacaacaaagatcttatcaccctttttaatagcaggattggttggagcttgtgttgcagtacccaatttaggagcagtaaatgaagtagcttgagcaataggagtaagaacacagcctaaactcaaaccgattaccaaacttgaaataatcttaatagctttcttagattctaacattttaataacctctttctatttacttactttctctttacactattactataacactgtttgattagaagtaaagcagatagtgctgcttttcacatatttttattaagagtcagtttttaatagagtgctttgcatcagcatttgcaaaaggtatacgcagctattttatattggtattacacttgaaataacaaattgtatagtaataatgtgaatttgtgaataacttaataaatagattgtagcaattgattttagaaaataaaataacaatttaagaagtaaaatattattttacacaaatcattatctttatcttttacaaatattagttggtagtaaatatctccgattattagctaaaaaaatagaggaaaaaatccctctatttttatatataaaatgttaaaatcatatatttaattatttaattgtaactaaagtatactttctctttcctttacgaataataacgtacttaccatcaaagtcacttgatggatcaacttcgaaatcagtactttgctcacgatcgccattaacataaatggcaccattctttacatcttcacgagcttgacgtttagaaggttcaatcttagtgtcaactaagaaatcaacaatattcttcttttcattgccagcttccgcacttggagcattcttcaagccttgttcaatttgagcaactgataagttcttgatattgcccgagaacaaggcatcagtaatcattttagcttcttcaagacctgcttcgccatgaacaaacttggtaacttcttcagccagcttcttttgtgcagcacgtttccaaggttctttctcagtcttttcagctaaatcttcgatttcttcacggctaaggaaagtgaagtacttcaagtatttaaccacatcacggtcatcttgattaatccagaattggtaaaattcataaggactagtcttttctggatcaagccaaacagcaccaccagcagatttaccaaacttagtaccatcagccttaagcatcaatggaatagttaaaccaaaggctggacgatctgcgccttcaagcttatggattaaatcaataccagcagtaatgttaccccattgatcactaccaccaatttgaagttgaacaccatcatctttattcaagtggtagaaatcaattgcttgcaaaatttgataagtaaattcagtaaatgaaataccattttcaagacggctagctacaacatccttgttaatcatattgttaacttggaataacttgccataatcacgcaagaagtcgatcaagttaagcttgcttagccattcagcattgtttctaatttcaaaattttcagtaccaaataacttcttcatttgattagttaagctttcttcattgtgcttaacttgttccgcagtttgtaaagtacgttcagtcttacggcctgatgggtcaccaatcgcaccagtaacaccaccaattaaaattactggatggtagcccgccatttggaatctcttcaagatcatgaatggaataaggtgtccaatatgaagggaatcaccagttgggtcagtaccacagtacaatgcccaatcgtcatgttctgctaagtactttctcaaaccttcctcatcagtttcttgattaatggcaccacgccattttaaatcttccaaaatatcaaattttgccatagtttttcctccaataaaaaacgtcccctggtcaaaagaccaagggacgactaaattacattattagccgtggtaccacccacgtttgcgctgctgcgccttattcaagccggtaaaggagcaaccctattaagtacttcgctaaaatcggcctgtctagctcacaccaaccgctagttctctgaacgctgagccgactcgctactcatttgttagttatgatattaacgagaaaaatagttttagtcaaccgctattttacaaaaattgttttaattgcggaccatggaccagttttttcaccattcaatgcttgcaatttcacttcataatttctatttctagtaataccagtaatcgcgttagtagcctgatcagttacttcatagtaccacttatttgtacctttttggcggtaggcaatgcgataactttgtgcactagcaattttattccaagccacatgaatgttgtgataagtactgtcagctttagcagtggttaaatcaactgcacctggtgttgcatctgaaggtgcatagtaagtgtgttctactgaattactccaagcaccaaaataattatctttttccggattgccgtaacgaatgtaatcaggattgcttacaccgcgagctacaaaatagtagctttgaccattaactaattttttaccaattgaaactgggattttacgatcatttttgtctatgtaacgtgtagcaggtgcagtacttacttctgtagtattgctactagaagtgaatggagctgcctttgagcctttttcacgccatgcaagttcataagtcttcgcatgacgtgcatcccttaagttagcaaccataccatccttagtgttttgtaaagattctatctcagtatctgccggtaccacacgcgtatcaggaacagccgttaattgaaaattataaagtccacgagtatttacactaaaagtataatttcctttagacaagtaccagctttgactagcaatcttattgccattaatttcgaaactctctgggtaaagcatcgtactaccgccaactggattattttcactgaacatgattacattcatcttgctgaaaatgttaccttttccaagctgataaatcggattattgatcatcctcatcgtaaccatttgaggtgagtcaatagtaaatgtgtagtagtcgacactatcgtaatcgtacatttcacccattgctttaatatcttgaccaatttcaatctttctagctttaagactactgttgtcattattcttctttgtttcaacgtaagtttctaaattcttacggatcttagttaaacgagtataagtagtcttcacactaatattctttgaactagttaaataatatgtgcctttacgcagataatacgtatttttgtccttaccataaggaatacaggtccattccatactattttttaaagtaacattgccattagtaactaatctaccagctgcgggtaaatggagtttataaatctttcccttagctacatagttacgcctattaatattaaaactggtaatgttcttaggattatatgtcccagcttgaacagttgttgcagaagatccaaatagtgcagcactggctagtgccattgttattatctttttcattctaatcacctttaaatcagctaattatcagttattcctcttagcccttattttatcattggatacaaaacattctaagctaaatagtgaattagttatccgacgggataattgattcactatttttattcttttgtagaattaaagtagtagtaaaacgatatgccctgaggtctttagacacttgatgtcgtatacaaaactggcagttttacttaagttttcaatagtctcttcgaagaatgtggacactagatgtcgagtttagaaaattagatctgatttcttaagtaaatacgttttactactaagttttggaggtttttattatgcaagttacttttggaattgatgtaagcaagtctacttctactgtttgtgaactaattggtgaaagcaaaaatgaactaaccattactaataatcgtcctggttttattcaattgcttcatgaattaaccgctttttctaaacatccgcaaattatttttgaagctaccggtgtttattcacgtacactgcaatcttttctggaagactatggctatgattatgtaattcttaatcctcttaaagctaaaaaagaaatggatatgggactacgtcataataagactgataaaactgatgcttatcatttagccttaattcaaagactatatcatcatccaattaatcaacttcaatctcaaacttataagcagcttaatgctttgagccgcttctatgaccagttaacagctgacttagtaatggctaaaaatcgacttcaccaagctctacaatcgacttttcctgaaattgaaaatctattttcttctgctaaaggtaaaaattactggcaaatagttgtgcgatatcctcattgtgacttagtaagaagagaagataaaaaacagcttattaactggttaatgagcttaaaggggattgcttttaaacacgctctaaggactgcagataaattaattgaattagcttatcaagcttatccagttgtatcttgctctagcatagaagtcgagcaagtgcagtattatgcacacagattgcttaatttaagtgatcaaagagaaaatttaatcgcaagaatggttaagttagcgaagtctttgcctaatcatgatttagaaaacctagaaagcattccaggctttgcacagaccactgctgtcagagttttagcagagttaggagatttacgcagatttagtaatcctaataaaatcaatgcttttatcggaattgatccaggcagatatcagtcaggagaaatggactctaatttaagtattactaaacatggcaatgcagtcgcacgtaagttgctttatcgagctattggacaaattgataatgcagctaagacaaatccgtgtcatatagcagattattatgaaagcaaaaagctatcctctcaaaccaaagggttcaaaaagatagctattgcttcaattcataaactaatcagaaccatttatgctctgattatcaatgatcaactatatgattacaacgtagccacacataaccaaaaagactttagttgtaattaattgatcaagtacattataacgctaagcccataaattaaatatagaggtgggcttatttagtatgctttctaaaaaaataaatcgccactaaaagatactcatgacaaaatttaggtaaaaaataaagccaaacaccttattgcgcttgactttacgtagaaaaaagaccgaactttacgttcgatctcttttatttagtcaccgatcttgtaaaagcccttagcttttaagccataagcttgaccagcagtcatatcatattgcaccatttcgtaatccttcaaaattgcttgttgttctgaagtcaatttctttggatcaacgaagtgccccttttggtcaactaattggaagccttgatcaccattgaagttaatcgtgattgctggcaacttcttgtgaacttctgttaacaatgcttggtaaggagttaccttagaattagtttgttcaagcatcattgcagtaaagtcactagtgttgacgtaattagagttgtgagtcaacttgctcttagcaccatgttctctagcatacttgttagaataaatgaagtagcgagttgagtgcatttgcactggataacgactagcgtagttttgtgacaagatacttgggtagtggtccccatagaagacaactgtgattggcttcttgatcttatcaatcttaccgataaattgctttacagccttatcagtgtattgaacacccttcatgtaagttgccatttgttcacgaatagcagcagtgttgaagagttcaccagataccttgcccatgtattcattgtttggataccaattgttgtaaggcatgtggttctgaattgaaatcaaattaatgaattgaccacccttcatgctattgatttgtttcaaaccatttgcataagtagtgtaatcagaattataagttgatttaccaagtttcttttgatcaatgatcttatatttagagccaaggtaaacaaacttattaaacttaaatctcttatagtcttctactcttgagtagtaagtaccaatgaatgggtgaactgcagacttataattgaagtccattccgaccgttggatagaaatcatggtttggcacaatttgaacatatggcgtcaaggttgacttgaacattcccatgttgaaaccggtcaaagtttcccattccatgttggcagtaccaccaccataacctgcactaagcatgctaccgtaagtagatctcttagccattgattgaataaatttaactggatttggcaccttaggatcgatctttacagttgggaaagtatatggatcaacaaaactttcactcaagttgtaaacaatagtttgattctttagagtattctttcttgttttgttaatttcattagcgatcttgctgtacttctcattcaaatgttgaattgtagattttgaatagttagttggcttattcataatctgcaggtcaaagtaattcaagaagttcaataatggaccgttaatttgaatatcacgttcagggtttctaaacgattgcttattatcaaagccacggttaatgtgataaataattccgccatcgtggttaaagcgcactggtgtcatgaacaaaagcaaactcaacaatgcccaaataccacggcgtttccatgagccctttttcttaattggaaacttaattgcaagaaagacagtcaatgcaatgataattactaaggcaatagcgatcataattatcttttgttggccgaccattggcatcaaggtcttccagttaacaatttcgtctaattcagttggataaattggttccccacgaagatctaatttaatcttgttggcaatagcccaaccaattgtaattacagttactaaaactgttgaagtccagtaacgcgtagtaatgaagtagaaaattgcaaacattgcatcaaggaagattgctgtcaaaataatagcgaagaatctagtcccgagcaagaaaattacggcattgatatcagttgcagtcgtaatttggatccgcagattatctgattcaattaagaatgaagcaaaacttaatacatagaaccagccccatgtaagtagtcgtactcgattttcaactatccaagcagtgaagttagtccaagcatcttcaacaatttctgctaagttattatgttgcttgaaaaaagcaaccgtccgtttaaccggcttcaccttgaataaatagcgctcatatagccagcttaagccccaggcagctagcatcatgatgacaatcatcaagaacttgttaaatccagcgctattggtaaagcggaacgatttaacaaaaccaccaataattggagcgtccataaaaataattactggaataaagaagtgcatctgcttagcactatagctaacaatcacttttctaaagattaagaaggctgctaaaaccattaagaacaaaaatggtgaagcaatattacttaaaaatttaggattccaggaataaacgccacttcgaccagataatcgttggtaccagtaaaccccattaaatccgggaataccgataaacattacgaagaaagacattactccagctgcaattgaccagccaaagacctttttaggaattttaacgttagctaaaaacatcccccaagcaaagtacaagatcaaataaatgccataaattgacttgttaaagatcattgtacctgcactagtcgcaaaaccagtcaaagttaatgcgctaagcaataatacattttgcttagtagtaatgcgatgttgtaattcatacaagtatggttgaactagcatactaaaaatcaagccagccaacaatactgatgtactagtcaaaactgggaaaaatactccccagagcttccacatattaaaggtacctggtcgtttaaagaagttcaccaagtataaaagcactagtgtaacaaccgctataatccaaaacttaaaggcttcagttggatgaacctttcttttgctataaacagcaccaaagaccattggtactagtaccatcgtactgtgaccaagtagtcctggaataaatctcattagggtacttaatggtaatctaccaaaagtgctaccccaagaatacatctgcactagcataaagaatgctgcgacaatcaaacaaatgatttgaagagcatttagtgattttttcttgttaatctcactcattttctctagtctgtgtcctcactaaaaatttctgtcattacttaatgatccctagcttctttttaattgaaagcagaatatcaacctttttgccatgaccggtgaaaaagtctacgatatcatgccagaacttaaagcacatgatcaaagtaatcacgataaaaacaaatcctgcttcttgattatgcaagaatgtatttatactgaataaaagcataaacactaaaggcggaatcgtcaaattttgcataattgctgttaataccaaagccactaataaagtagcaaagccagctttccaattataaaaaactgctacctgagctgcaaccgcaactcctttgccacctcgaaaatgatcccagattggaaaacaatgtcctaagatcaggcctagccctgtataagcaatattaatatgagctggaaaagcaaaatatacaataaacaaggcaattaaacttttaagcaaatcgcctaaacaggttaaaataccccattttttaccaaaaacagcacccatgttagccgttcctggattatgtgaaccgtattcagtaggatttatttttaaaaagattttgccaacgatcatcgccgttaagaaatttccaaaaacgtagccaatcagagtagcccaaatgcgcgccattaattatcaccttcttcggtgtaatcatagatatgatagtgctgcgttttttcgctcttaaagctaaagccatttgcaatattcttttcgttttggaaagtttcattatttgaaaccgtttccttaggtaaccctaattctttgcgcaccaggttagaaatccgttgcaattcactagttggctgtacttgataagccgcatcgtcgatcattgcattgtaaccatgtagataatcactagatgacgaattggcacaactacgataattcatcgcaatctgctgcatcgcactaaatggcaagttagtccgaacattgcttgacacagaagtcaaaattgaatccagatttgataatgaactaattgaaactgccttcttgatcaaggtggtaattacctgccgttgtcgttcttgacgaccataatctccacgcggatcatcataacgcattctagaatatgctagcgcacctgcaccacccatatgggtcagcttgccctttttaaaaatataaccgccatattcaaagctaagcgttggtctaatattaattccgccaacatagcgaatcatcttcatgattccacccatgttaaccacggcataatacttgattggcacattgattaacttagaaactgaatccattgacatcttagccccgcctaattcataagcggcgttaatcttttctgtcttgaagctctcgcttccaaccatctgtgccatcgtatcacgcggtgttgagaccaatgtgtaacgcttcttagcagggttaactacagctaaaatcatggtatcagtccggccgcgcttttcagttcgatcaagggcacctgtatcagtccccatcagtaaaacagcgaacttcttctttccatcaaattcacctgtagttttcactgcagtcttaggatcataggtcttatcaaccgctgacttagtacggaaataaactgatgcaaagtacgccgctccagcaaccgcaagcaaggctacgatactaataacccagacccaaatatgacgatttttataactgtgtgtgtctacccgactattatgcgggtgattagatctttgttttctatctttcataaaatatacctattatgatgtaaattcacattgaatgtattataacaaaaaaagcaaatcatcgctgacttgcttagtatatcttattaaaatcgttactaatttttacttcaaagtcaagcttaacgcaaaattacggctactttttgcctctaattcaattttatccgtaaaagctgtaacgcttccttcttttgcactcaacttaaaatcagttgaagtaagatcaatgccatgttctttgccagtcaaactaatcttattgacctggctttcactttgccaagaagttggtaagataaagcccaaagaaaatggcagttccttatttgaagaattttttaaataaaaggatatattgacttgattaccctccaaagcataagtagtcattacttcaaaatgatatggaaaactcttatagctctccggcgtatcaattaaagttagacttacgcgagtatcacctttgtcaacaacggtccaaggcaacttgttagccaaattatcggcttgatccattactggaaaagcaagtgccataccttcttcactttcttgctcgccgagataatcaaattgatctgttaaagacaccagatgtgccatccgggccccattctcatcgacagagacttgaaagagagaattatcgattgtttgcatatttttctcccaatttctacactcctgtaactcaaaatagcacttatcatatacaactgtcaattttcaccactttcttagaaaaaaatggcgatctttctttatttataatataatgaagttgttccaaaaaaattatgaaatcaaagaaataattatagtttttggagcaagttgatacaaagaaggcatcccttaacggtgatgccttttttggtgtataaaaaaactccgacttacgccgaagttctatttgtgtgaataactacttaataaattagtcgtccaacttttccttgttaacaacatccaagttttcgtcgaatgtgtaaacaactggttcaccggtcttcatttccaagttcataatgtcttcatcagaaatgttttcgatgtacttagtcaaagcacgaagtgagttaccgtgagctgcgataattacgttcttgccgtcaagtaaatctggagcaatgtggtcttcccagaatggcattacacgatcaagacatacgtgtaagttttcagccttaggaacgatgtgtgggtccaagtttgcgtaacgacggtcatgtgcttgactgaattcgttgtcatcatcaatagctggtggcaaaacatcgtatgaacgacgccaaatgtgaacttgttcatcgccgtacttttcagcagtagccttcttgttcaaaccttgtaaagcaccgtagtgacgttcgttaagtctccaggtcttagtttctggaatccaaagttggccactttcttcaagtgcaaagtgcaaagtcttgatagcacgagttaataatgaagtgtaagcttggtcaaattcaagaccgtgttccttgattaaacggccagccttcttagcttcttcaacacctttttctgaaaggttaacgtcaacccaaccagtaaattggtttgaaaggttccattcactttgaccgtgacggattaaaactaattttgacatgaaatatctccttttaaaattcaatgtttcatccatattttacacatttcacaaattttttcatagagttaagactaaaaaaatcgtgttttttcaattttgtaacgttattcttgctatactagaagaaaaaatttaatgaaagaaagttatgtatgaaatttaaacatcaaaatattatcattaccgttttattagcattactctttttaacggcctgctctaagacaggttcaaaaaagacagctaatttacctactgccaagacgattttaaccagtgcagaaaaaacgaaattcagttcaatgcacgctacttggaatgaattaagcaatggcaagtctttgcaaaaagccgaagcccaatatactaaaaagccaacgattatttatgctaatgtttctagcagctctaatcactataaaatgtggattgagggtaaaagcaactatatccaaatgaaaggtaccaattctcagcgttggtttaagacaaagttgtctaaggctagtgcctatggtgccattaccgacaatttgaacggcacattactcatgcctttcatccctaacgcaaaatattttaaggtaaagcaaaacggcaatgattatctgcttacttataaaggaaataacaaaaaaatttggaacgcaattgtatctgattctgcctttactgctttaatcggcatcgatcttgatgatgttaaaccaattagcaacgaaatcaaaattaacgtagatcagaattacgacatcaaaaatgttaatgtgacttctacttataaggatgaaggacacaaaaagaatttcaccatgcagattgatcaaattaatcaagtcaaaaagttgacggtacctgcttctatcaagaaatcggccgtagatttaggcaaaattaatacaaaataaagtaaaagaatagtccgtaactccaacgagcaacggactttttagttataatagacttattgaagcatagaggagaaaaaaatgaaacttaagaaaacgattatcggtttatcctttgctgtcctctttttattaggtggctgcagtaaacaagagaagaaggctacttcagctctgactaagactcaagttgtacaaaaagctaaaagtagcttcaagtcgggacaggttattcaatctgttactctgggtaccgacacttctaatcaagttgccttagctaacactacctttggtggtaaaaccactgtttaccacatcaccaatcaaaccactagcaaaggtaaaactagttctactgaggaatgggtcaaccttaacaatgtctacattaatggacaagatacttggtacaaggctgaccttgaaaaactaaccggtcataattatgccgacttaaccgatgccatcatgaataaccacatgatcaccaatccaagtgataagttggtttctgcttataaaatgaaaaaaagcaaaaaagatggtgtttacacttatactttaactgctaaaagtactgaccaagctttgatgaaaaaggcagcagcaccaatttttgacactactgctcaaagtacaaatcaagctaaaattttcagccaaattaaaaaattaggcaagtaccaatcaatgaatgttaaggctgtaattaaaggtaataaattatctacctttaatgtctttgttaatatgaaactaggtaaattaatgtacgttaaagttggtcaaagttatggcaacttcggcagccatgacttcttaagagtaccagactctgcaactaacgctaaagatttaccaaccactaatactaaaaagaagtaggcaaaaaaatgaaattaggaattattggcagcggcatgatcgtccatgactttttaacaaccgctgatcaagttgcgaatatgactgtaacggctatttcctcaactaagcgcagtgaaaatattgcccgggaattagctaaaaagtacaacatcaaacgtacttatacggacaatgaagaattaatggctgattctgaagtcgatacagtttatgtagcggtgccaaacttcttgcattatgagattgctaaagctgctctagaacacgataaaaatgtaatctgtgaaaagccatttgttcagagcaccactcaagcaaaagaattaaaaaagttagccgacgaaaagggtttgatcatcgttgaagcaattactaacctttatttagaaaacttcaaacaaatccaaaaagaattgaacaagatcgcaccaattcatattgttaacctaaattatacgcaatattctagccgctatgacgcctttcttgaaggcaaaattgcgccggtttttgatcctaaaaaagatggcggtgctttaatggatttaaatatctacaacattcatcttgtctcggcattgtttggcttgcctgatcaagtgcaatattatgccaacatgcaaaaaggcgttgatacttctggtattcttcacctctcttatcctgacaaacaagcctccctcacggcatcaaaagatagctatgtaacgccacgttcttttatcgaaggtgaaaaaggtagtatctattttgacggctcaacgggaacacttgataatttcacagttgaaatgagaaatgagcaacctaagcgttataatttaaataaatatccgcaccgaatggcagctgaatttaatacttttgcccagatgattgatcaacacgatacgcaaaaagcggatgaagcatttgtcaatactttagagacaatgcaaattttgactaaagcaaaaaattctatgatttaaatttggaggaaaagccattgaaaattttagtaactggttttgatccttttggtggcgacaagatcaaccccgccattgaagcagtcaaaaaactacctgactcaatcaagggtgcaaaaattatcaaattagaaattcctacggttttcaataaatctgcccaagttgttcatgatgccatcgtgcaagaaaaaccagattatgtacttaatgttggtcaagctggtgggcgtgctgctttaaccccagaacgagtagctattaatattaacgatggtcgcatccccgacaacgatggttatcaaccgctcggtgaacctatccaagccgatggcgacacggcttacttcacccaactaccaatcaaggcaatggctaaggcgattcgcgctgttggtctacctgctacagtttccaacactgccggtacttacgtctgcaaccacatcttttatcaagtgcaatacatgcgagctaaagaattccctagccttaaagctggcttcattcacatcccatttttgccagaacaagttgtcaaaagaccaagcactccatcaatggcattagccgatattgttaaaggcttaatcgctgcaattggggctattgttgagcgcgatggacaaggcgacattgaagcagttgaaggacaaaatcattaattacgtaaaaaagaggttaaatgcaggatttttgcatttagcctctttttatctctaattttgatgactaagtaacttctttactcgatcagcaaccttaaattctccagaaaagatcaagatatcattcggctcaataacagtccaaccgtgtggtattaaccactcatcaccacgccgaattcgactaaccgtaatcttgtccacaaattccagatccctaagtggtcgtccagtataggaagtacttctcaccttaactgagtacaacacattgttagtatcagtcataatcttgtagaccgttggagactcaatcaaagctcgcatcagagcagaacgtacattagtaaagttgaacaactctactcctgcctcctggcatcgagccatcgtattgctatcgacttcattcattcgggcaattgctcgtttgactcccaagtctttggcatattccgccattcgtgcattttcttgatcatgatgccctgcagctacgaaaatgtcgcaatcaaaggcaccactacgctctaagctttgattatccaaattatcaagtaatgttaaacctttaaccctactatcataagtttcgtattggtcctgctgatcggtaaacatcttgatcgtataccaattatcatgcaaatcatgtgcaactggtaccgtaaaagtattggcacccacaatagtaacagtttctttcatccgatcctcaggtgataaaacaaagtttgaattaaagacaatcggactcacgatacaaacaataaccgcagctaagataaaggcatctgattgtgttgaagtaattgcatgcaattttctagcaacttgtagagttggcaaaacaatcgtaattgtagtagcagttaaaaagccaccagcaaaggcatttttcttttcaaaatagcgcatataaagaaaaactacaggagctttagctaagaacaagaaaatgaccaaaactggcaacaacatcaatgatgatggatgagcaaatagtgactttaaattcaagcccacgccagtcataataaaaaagattgggataaagaacccataaccgattgaagttagcttatctttagttgcctcgcttggttccaataatttcattaccatcccggccaagaatgctcccaaaatattttcagcaccaactcgctcagctacagtaactaaagcaaaaatcaagaagaaggctaaccgaatatccaattgagtcgttgccttagttactttgctaaaccataaatacggttgcttaaaccgccgcaaaagaataatcgcagcgataaacagtaagataatcaaccaaagctggccagcattccctccattaactgaggcataaatcgttaataagagcaacggtattacttcgcccaaaaccgcagttaacaaaattgtctgaccaatcggtcggccaagaatatccttttccttcaaggtagcaataactacacccaatgcaatggtcataaaaataatcgctgccaagataacattgctaaatagccctatcagctttaaaacatatgccaaaacaaaggccattaccacaattccagcgaaagctgttaaagctgttggcaacggatcgacagtttttcccgcctgtgatttagccttaggattattcttgcgctgtagcaggtcaaaattaatttccattcctgataaaaacatcagcaaaattacgccgaggttcgataaaaatgttaaatcatgtatcgaaaccacgatattaaatccgctcgaacctacaataattccgacgataatttcagcaatcgccgttggtacagtgcttattttgaaacgcgccataaatattggaattacgagcgctaataagacgaccaaaaataatgataattgcgccattaaattctccccttttcacattcaacacaagaattatacaaaaaatacgtcttaattcccattatttatggtttaagacgtatttttctaattaatatcgctagctaaaacatattgtgtagcatttaaagcataatacttttgacctttaattgtaatcttgctgccatatgtcatgacccgactacccttcttgaccaaattacctttttcaattcgacctgaacgagtccgcaaatatgtattcttcttaacagttctagcagtagcatcaatattagtagctactacgtattcgttctttccaatttgatagtacttcttattactgattatcttgtagcctaaaacggttaccggactaccagctaacttcaagatcttggtcttcttgccgttcttgtcataaacataagcatcgtgacctaaagttaccgcaccttgaacttctgctggtacttcgtccttaatcttatttggatccttagtatcagtattttcattcttcttttgcaagtcatagtaatactcgatcaaagaataaaactgatccatgtcgtaatcccacttggcaaaataactatcagggtcaacgtggtctgttccacctaagaaggtgctaaccgccttgtgtgaccaaattgtgccttcaccatcatcgcaagcattgtctggctttaaattgtaacgatgaagcaacttggcaatataaattgcatcattattaactgacttagcaaaggcatcacgactatcttcttcacaaagctcaatttgaataaagcgattgttggcattcggtcctgcgccccaagtaccattattaggtgaatacatttggatgacttgcttactatctacaaaagcattgacgtaagcgttgatatttttccactcgcggttaaagtagattgcttcatcgtgagcagtagctccgggatcgtcagtctcatgaacgacaattccttctggcttgccattttgatactcaacaccagggaatttattgtacttaatcccctctagtttgagcatcttgtataaataggtgacaccactatattgatatttcttcgctaaagtattaatcgaagcggctttgacctggttactgaccgatgatacgccgactaaccccaaaagcgcaattaaggcaattaaaaatttgcgtatcttcacaacaaagccctttccttaattacatgaagttcgatttcttaacgtattgacgaatacctaccttatagtatttcttaccattgatagttatagcactgccgtaagtagcaatttggctattcttcttgtgcttcaaattgttatcgcgattgccatattgattgtaaacataagcattcttcttcaagaatctgaggctaccatcaatattaccagctgcaatgtattcattttcaccgacacggtagtaggtcttacccttgatggtcttggtaccataagtattgatccacttaccaccgttttcatcactggtcttgtacatcttgccctttagcttcttaccattttggtcataaacataggcattatgcatcaagttcttagaaacagctggcacattcttaggtgcctgagttactggttccttagttgcggaactgctcttgtccaaaactgagccattaacccaaccgcgaccatcaatatacattctgcttgaaccatcatggaaagtaatagtcttggtaactactactttttcaccagctttaacagagccaataacactggcaacagatggagcagttggccaattataagttgaactatccttgccagcagtataagttctagtagtattaacggttactggatcatacttagtcaaattagaactagtaatatgactatttaatgccttatcatacttagagtctgtagcatacgtaccggtcaaagccttggttgcagctgcataagttgatgcattttcaatccaagtgcccttataacgcaacggatcccaagaaacaccatttctcaacttactcccattatcttcaaatgattgttcaaaagatgggtattttctaaacttagcagtaatatagtagctcttaccgtttttatcttcttctctagtcttggcagtataagtctcacctgtccaagaatcatcagccttcatcccaaaaaggttattagcattcacggctaatcctgactttccccagcctgactcagttattgcctgggcaatcatcactgatggcaaagttccatattttttagctgctttaactgcctgcttggcagccttgtttaaaaatgcagtttgatcagcggtagcggcagaaactcgttggcttgaggcttgattcatcatcgtagtatttactgctggcacagctacagaagtaagcattgcggcagcagcaaaactggtcaaaagtctcttcttcataaaaaattatcctccttaatataacacctccattgtatctatcaaattaggtctagacaagcgtttcaacagatttgtcgtaaaaaagtaacatttgtaataatattatttaacttatataaattttttaataagttaacttcagcatagatgaaggtagtggattacctatactaagttcatttctaaacatatcaaacagctcttcgggagaagattcatctaaattatgtcctgagtgaactagtatccaatatacctttgtagatttgaaaactttagttgccttttatcttcccaaattagtattctgtgtaattaactcgattgtgttatcagtcataaagtcaataaaactttgttgttcttcgtctattggtttagcttttaactcagaattaaacattctgtacaaaataatagggtgcgcattttcgatattacgcttcgctagccataagaacgcatatgtatctgacttttgaaaatcttgttccgcttctttacgcgatttccccatattttctacgatcaagtccactgttttatcagttaattcttgaattttagttttatcctttttatttaacatagttatcacctacatatcttaattttgacaatatataagtacgcaaaaaatgtcgatttctttttcacaaaattacttctttagattttctttaccttattattttacaagcatcccttaacaaaaccaaaaatgacactctaaatcatcaaatcgcatcgtactcttttttcataaaagtatctgcgcagcggacaaaaaccacccaaccgaccccaagcaaataagaggacagaaaccaccctttcattgcttgaaaaaaatcgagtacacaatatacgtgcttcaggcgtgtcgcctgtacgcatgctgatccttcaacaatgactactacctcatgagagttataaactcatggatcttgctttgaagaattttgtacattataggctccctacatgctgaacctatggcctattacattttttatatttcaaggaggaaaagaccacatgaagaaaaatttaagaattgttagcgctgctgctgctgctttattagctgttgctcctgtcgctgcttcagctgtttctgttaacgctgctgcaaccactaccaacacagtatacactgtaattaatgctgatggtaccgcaatcaacactccagctgatgcaaaatacgatgttgatgtaacacctaaccttactgctattgcagcttctactgtaaatggacaaactattaacggtagcattactggtaacattactgctagttacaatggccaatcatacactggtactttagatactaagaatggtaaagtttctgttattgattcaaaggatagaccagttattcattttgggaagcttgctaatggtttatatactgttattgtaaagggtgtatcattcaactttggtattgctaacgcatacaatactatcactcttggctcaaagaacagcaatgttgagttctcaactgctgagggtaagagctttgctaacactaaaaaggttgaacttaaccaagatggtactttaaagaatcctatttcaattaaagtttcaaacgttaatgcacttgacctttcaaatgctagcggtattaacttctacaacgcttcaaacggttcacaagtaactaagggttcagttaatgtaactgctggtgttaacggtcgtttgaacgtttcaactgttgctagtgaaatcttaaagaactttgctgcttaccaagtttcaaatggtaaggctgtatcacaaatgctagaccaaaaggctgtagttgctgatgttaaggctgctttaaaggctgctaatattccagttgacaatgctggttggtttgctgctccaacttcattctcagttaatgtaaaggtaacttcatcaattaatggtgttgacgctactttacctgtaaccgttaatgttgctaacggcaaggacactactgtaccaagccaaagcaagactattatgcacaacgcttacttctacgacaagaacgctaagcgtgttggtactgacaagcttacccgttacaagtcagtaactgttgctatgaacactactactatcaacggtaaggcttactacgaagtaatcgaaaacggtaaggctactggcaagttcatcaacgcagacaacattactggtactaagcgtactttgaagcacaacgcatacgtttacaagacttcaaagaagcgtgctaacaaggttaccttgaagaagggtactgaagtaattacttacggtggtacttacacattcaagaacggcaagcaatactacaagatcggtgacaacactgaaaagacttacgtaaaggcttcaaacttttaattaagtctatgtagtagataagataaaacgaggcaatttgcctcgtttttctttttgctctagaaaaaggtaccgcttgttgcgacaccctcggaaaatattattgttataacctagctctgcttcagaaattcttctaactgtttatcagagaacacattgccatacttttgctttaattgttgcaggatttgttggctagtgcagccaacatctttcaaagaagcgactaatgtaagtgcacctgttttaaggcctttcttttcaccaacttgctcgcgttcaagcattctagtttccaagtccataatagtatccctccattctggatcggcattcattgattcaatgcgtttttgtgccttatcaaaaagcttgtcaccatgtactggctaattttaaatccaactctataaaccatttgttataataaacgttgacgtttatgccttccaatatcagatctcgcattgggaggtgaacacatgctagatttgtttcactttttattaggctctatcttagcgccacttttagtgaacgtagtttcttatgtcttagagagactatttgacaagcggctaggcaatggtcatagcaaaaggcgtaaaaattatagattgggctctaaaagacatcacaagcgtcactagcctcagccaatacatttagttttaatgctataaaatttggtgaaacaaaaaatcgttactcatttgtccgattagagtagcgatttttttgtgtcttaactctcgcacatgcaagtcgttccacttttatatatacatgttagcatatttttctatatttttctatattcagggtttgtttgcagtatttacgtttaaattaatgttttggctctaaaaaagatgccgcttatgcgacatcttggaaaatattgttgttacaacttagctctgtttcagaaattcttctaactgtttatcagagaacacattgccatatttttgctttaattgttgcagaatttgttggctagtgcagcctacatctttcaaagaagcgactaatgtaagtgcacctgttttaaggccttgctgtaggcctttcttttcgccttcttttctgcctttcttctcgccttccatacgacctttcttttcaccaacttgctcgcgttcaagcattctagtttcaaaatccataatagtgtccctccattctggatcggcattcattgattcgatgcgtttttgtgccttatcaaagagtttatcgccatgtaccggtaaatctttcatgagtttgactaaattaagtaatgtttcagtctcggttccatcaggaactccgtttgaattaattataattttagtcaagccatcctgcaatatatctgcatgattgtctacattaatagtttggtatgtagacttgattgcaactttttgcttaattttgaacgtgcaaagaaaaataatgaagacatttttcaaattattgtaagtatagccctggtggagagtatacctttgatcgtttttcgaagcataatagcgcatgcgacgggcaatatcgtcatcgtctgaccgctgcatctcaatattgtaaaggttgccgttaatatcctcaaccaaaatatcgagtcggacatctttttgatcccgatgctcaggatcgatgattacttcttgcttcttaggcggaaagatcttcttaattaggatctccggcagaattccttgcaaaacatgcttgcagaaagctggattggacatgatttcgccaaaaaccttatcttctgaaaaaccaaaccataattctttttgtttgtgcgtatttttcattgcgcacctctttctaaaaaatagtaggataaaatgtaccctctattatttattacacaaaaaatcggcaaaattttttataaaattgtttttttcagcataataatttctagctatacaatcaatgcttcatactgtataatactattcaatatttgaaacaatatagatatattcaaacatagggagtgtgatggatgtgtcagcctacaagcaacgtaacttggggattattagcttgcccactgacataaaatatcgtaattggtccaaggaccttaccaagcggagaattgagaatgactcgcaattagagcaatacatcaagtatgacaataaatatcgactcaataagaacacattggcagtctatgagttcaagcaaaatcctatcttaggcaaatataaggcagtagccttcgacctgaatcgtggaattgtgcttagtcagaagtcaacacatgccatgatgcaaggattgatgcggcatgccgtacattgcgatatgatttggcagagaatgctagctcgcgaggctggagttgatatctatcaagggattgtcatgtacaatgtgctttatttttcaatgcatgcatttagtggaaacttcttcacggactggatttgcttgcactggattaaagacttccacgtcaaacgccatgatcaagctattttcaacagtattgcacttgatgaaaacggcttggtttataattttgcttttgattctcctaagcccaatcttacgaagataattggtcagtatctgtttcataatcattattattctgacttatattatcagcatatgttgcaagaaaataatcttcgcgtaacagccattaattctgattcaatcctgcataattctaactattatgtgcaactggacttgtacgctattgatagttttaaaaagctggcagacaaattctacaatcatgttttgaacttacacctacttacgattgtgaaagaatttaagccattagattatttgcaccgtgaacaccgcttttttactaagcagattattaagatcagatataatcgttaacagctctcatgagctgtatttttttgcacttttttgactatcatctgttcttcgtcaggtactatctgacttgactttgcttatcgtagaaattaacaaacacatgcgacacttgggattagagcatctcaccactaagtttttttgcagatccaatcttgctaatctaatagtgcacaagcgcttgtgacatcatttaggagagtgtcacaatgacaagtcaaaaatatttcgaagaagcatggaaaaatcgtaagttagttggtggtgccttaaaggcggcacatgttcgaccggactatcatctctatgaagatctgttgcaagaaggtgtaattttgtatgccgagatgttgcgcaaattagatgggcaaaaggttcgcagtgagattgataagcttagcttcaaaaaggttctttggcaaacaatcgatgctctgcgccgagagcaacgcgtatgtgaacgcaatactgcaattgacgaggcttatgacttaggtaaaacagaggcatgggataatcttgtagctttaaaggatgaagttaacaaactaagtcaacttgagcaagtaattctttttgagcatttgcttgagaaaaagacaattacgcagctagttaaagaatgcggtataccgcgtattacgttgaaacgattgaaaaagcagcttttaggtaaattacgtaatgtgatggaacaataagttcattttgtaacaaaatttaatttcataaaaaattttacctactttttgcgtaataagtagtagagggtaattttgctgaagcaataattgaaatgaggtaaaatatgattaaaataaaaagtcgatatccgagaagcactgacgatttggtctttggtcacgtcatgagcaataagaagaattgaatttcagactggtacgcacgttaaagttttcaattctaagggcaataatcatgacctgaaccaaaagataattgacttcttggattacatgaatggaatcatcaatcaccctgaaggttacatcgccagcttgcaaaaggatgtcgaccattacgtgaatagcggaaagtgggtcgaagatatggacaagttggaatatgaaatgaatgaagtcgctaggaaagtaaaaatagaagatgctaagaagctagtcctagtcattaaacgaatgggtggtactaaagacactgccttacaagaactcacaaacaattacggcgatatgcttagccatgatgaaattatcaaactagtacatgaagtttatcagtaaacagtaatcaataatctacagtaaaattatctttcaaaggtgtcgcaacagcgatgccttttttagagcaaaagaaaaagttcccccaattttatgttttataaaaaaaacagtatctatgctaattatggttctcaaattgaaaaatggataatttgatgttggaacaattgatggtattcaagttaaatactgcttgattggttgttagaagagtaaaaaagccatttcagtcacatttttgctgaaatggctttttctattttccatcttttaattatattatcttgaaatgacctcttcttatcctgaagtgtagtctaccaaaaatgtcagagattatttcgttccttctcgtagagtaaattattatcctaaattctattctcgttaatcatgctatcaggcaatataattttcattcgatcatcgaacatattgaagtttacctcagagccttgaatctgataatcataatgaatcaatgcattaactaaaacctctcgaataaccttaaatggtttaaatatttttatattgcacctgtatcataatgataaaaaagttaacgaatgcaactcgttagctctagtcgtagtctaagataactattagcttaatttttaagagcaaaagaaaaacgaggcaattgcctcgttttaaattattttctctttttagtatgtttgacagttttcttatgtgcctttttgtgattcttcttatgagctactttattatgtttcttcttggtaactttcttcttgcatagtatttccagtaatattacccaaactagtatgacttaatcgaccattcttgaccgcaaaatcaaattcaagattaccttgtgcaagagtactgtgtgcattaacactagcagaaccaataatttcaccattgttattaacaatagtaactgaacgatcagttgaagttggcgtcaaacccattattgttacttgtgcatttaaagtatatttaccattgtttaaaactgcatcgtttgtttcaatttcagtaccagtattattagtcaaatggatgttattaattgaggtagaagcactaattctagtgctgtttgtgtatacacttctatcacgaagatagtgagtgacaacactacttttagttacaactgcagctgcttgaatagtatttggggcagctaccaatgaaactacaggcgatgcagcgaacaaagccgccgctacaatactagtaaatacgcgtggtgctagttaaatcgttttagttaataaaaaagtccaattagactagactcaagttgtaagtaatttaaatagaaaagagtctgatctaattgaactatctcaagcttaatcgtttttctcaccatttacaagttagttttaatcggttaaatgtgatttgtcgctcgctgtataagctttatgcgcctgatggacttaaacatcgtaaaaatgttgatcagaccaagcttcctgatagttctatcttagcgatgctcatttggcaaactgaaattggaattgaatctcaacgaagattctgtaaattcttcgttggcttatctcattctcgttttaaccgtcgagctcgaatgctcttgcctctaattcgttgtatccgtcagggttggaatcaggaagtaaaggtaggtggagaattattgattatcgacagttttccgattccagtttgtcagcctgttcgcaattatcacgttaagatcttccgtggcatagccgatattggttataaagcgacgaaaaaaatctactattatggcttcaaagtccacgcaatagtgagtgatgatggctatctgcttgactacgcagttactaaggcgtcggtacatgatgcaaaagagacggtagaattgatgatcaatgctcatccaattaaccattatcttttaggagatgaaggctatttaggaaaagacttagcagccaagctaaagcgtatgggatacgtgctttggacaccatatcgtaaaaacatgaggggtgctaaaaagcataatgatcatcagttaatggcaattagaagaacaatcgaaagcgacttttctttgcttagctattacaatgctgagaataatcgagccaggagcttagtaggttttcaacaacggctagaaatagctattttagcttataatatggcatattgtctagaacgatttaactagcaccacgcgttagtaaatttaaaattctttttcattattatttcctccaaaaaaagacagagctttcgctctgcctttcttatttgtcagcgtataccacagacttaattaaaagtttgaagcctttacgtaagtcttttcagtgttgttaccgatcttgtagtatcgcttaccgttcttgaacttgtaagagccaccgtaggtaacaaccttgtcacccttcttaagaacaaccttattagcacgcttctttgaagtcttgtaaacgtatgcgttgtgcttcaaagtacgttcagtaccatcaatgttgtctgcgttgatgaacttgcctgaaagcttgccgtttccaactacttcgtagtaagccttgccgttgatggtagtggtcttaggtgaaacagttactgagttgtaacgagtcaacttcttgtcagtatcaacatgcttgccgtccttgttgtagtagaaggcgttgtgcataatagtcttgctttggctagcaacagtagtatctggcttagtagcagttaagtctgaactcttaacgaattcgtttgagccgtccttgttgatacgagtgtattcaacaccgttaacagttaccttaccgaatgtgtaaacagctgcgccctttgcaagagctggaatattagcagcttctgaaacaacattaccgttaatgttgtaaactttagtattatcagcctttacgtattcttgtggtgccttttcagtaggacccattacaattgcgtaaacagtaagctttgaagtaaagccagctggattagtagcagtaatagttactgggtacaaacctgcaacacttgggttaaccttgcttgagtcaatcttaatattgcttgagttgatcaattgttggtgagcagctaattctgctggagtcttgtcgaagccagtaccataggcactttgtacgtaagctttaacagcaccagttacagcatcgttgttaaatttaccatttacaataactttggtcttgtcagtgtccttaagtactaagttacctgaagttttaccatttgacataacgttgtcattgtagtaaacgttgccgtcaaatacaaatgcaggtgcattgtagtttactgatgcattaattcttacagtaattgtagttgaattaccattttctgacttagcagtcaacttaaggttgaaaccgtttgctggataatcaaagttaccgtttgaagcacgcttcaagccttgagctactaattgactttctacatctgaagcggtagtagtcatattaatagtgtcatttgattgatcactggtcttccaagcatagtgcttttgaatagcattcaaaagatctgatgaactaaagccgttagcaatttcgtttaatgaaacagtgctaccatcgtttacaacagtgttagtatccttgttgtagaagtaaggagtaccttgttggctagcgaacttagcatttaaagtaacttggtaagctctgtcattaacagtgaatgtaacaacttgttggaattcaccatttgagtttgaagcagatgctgacttaacagtaatattcttcatatcttctggcttagcatcctttaatgcatcgccacctaattgtaagatagcatccttttgagcatcgctcaatttgatactgaattgagtatttgaagcacggtcaagaacaatggtgcctcttaatgtaccaaggtcagtaacttcttgagaagtagcagctgaaacagtagaagcaggtgcaacagtgttggtagtggttgcagcagcgttaacagaaacagctgaagcagcgacaggagcaacagctaataaagcagcagcagcagcgctaacaattcttaaatttttcttcatgtggtcttttcctccttgaaatataaaaaatgtaataggccataggttcagcatgtagggagcctataatgtacaaaattcttcaaagcaagatccatgagtttataactctcatgaggtagtagtcattgttgaaggatcagcatgcgtacaggcgacacgcctgaagcacgtcctattacttaccacgattcatattgtactaacctcttgaaaaaatagcaagttaaattgactataatcttgcttttgtaataattcacctattccctatcccaataccattcacacaaatctaaaataacaaaatgccgtaatcctagacacaacaagaaaaagcgagcatgcgcccgctttactgtttctttactttttcttaaattttacaacgatgtaacaaaatcaattgaaaaagtaatattactatacgatttctgttaaaggtctaagtgtgaactctacatcttgcgatattttctcctgagccttttgaccaagctaattagttggtcaagcaagtccagattagtcttgcttagctgcaggctcaactgcagattctgctgaatcattaaagatatcagtaatagtgcgttcaatgtatgcagctgattgaggagtgtgataatatgcaacaccgtctttctcgaatgcattggcttccgcaatcgtattcatcgcaccgcgtacttgatccgcagttagattatcgactgcatcccccaacgtaatactaattttcttcttttctccgttcaagaaagttaacttcatagtcttagtagttttagccatcattttttctccttatttcctaaatatgttcgttaatttattcagctgctggtacaagacgtgaattctgcactaagtatgcttcatcaagtgagtcttcttgcaaactagcaattgcttgacccaccttttgcaactcatctgccttagcgccagtcttcacgttcttcaaattgcgggtcttttgcccattcttatacttcttgttgccaaatacatattggattgattgttcagttaattcgtaattcatatttttcttctacctcttaataattagttaaaattgagtattttgtaatcaacctgccggccagatgtcttacactataactaacgattcaaagtcaccaattggctcaaattcgttaatattttttctaagataagggagagttgtcttaatatgaagaaattagtcttttggggtgttattgctgcgatgttcatcttaggtggaggtggcgccggtgcttacattagccatgccaacactcaaacgcacaataatacttcctataataattccaataaaaagaacgctgatcctgaccagcaaaaatctaataattctgatgcagattctaacaaagataattctagtcaggatgattctgcaaaatcctcatctgataaggataaagagcagtccaagaagtcagatgatcaatcaagttcttcatcttcttcaagcgatcaccagcaggaacaatcatccagcagccaatccagcgcggcttcctcaagcaacgatcaatcatctgccgtaagttccagctctgctgctgatgataacaagtaagcaatagagtagagggagttttataactcgcccctctcattgcaccggacgtacggttccgtatccggcgctacgtttgtgattatttacgagataaataatattctagcggatcgaccaagcctgggcgatccgctttgcttatgcccaatacttttgggctaagcagaaagttaatgacatgacccgtacttcttttataccaacctaagcgcgtattagctactttatgaatatcttcatcactaaaattgcactttagtgccttgttaatccgcattaagttaatgtatattcgttttggtagtttccattgtttaatgattaccacccgtactttatgacgcagccattgactgaacttaattagaaaatatttcatgtcgccaactctaaagtaattgacccagcctctaactacttgatttatcttagtaaagactagtgatagaggctgagcagctgcttttctgcgacagagaagttctctcatcttgtcataaagcttgattttgcggtcatctcctggctttgcttgccagtattcgccacttttccagaaggtaaagccaagaaagttgctcttggttggtcgtacaactttggttttggttgcgttgacctttaggaatagctttctttctagccatgatgaaattgaattcatcacacgtttggctgatttaccgcttttgacaaagatattgcagtcatcggcatagcggacaaagcgcaggcctctttgttccaattctttatccattttatctaaatagatattggatagaattggtgaaagagggccgccttgtggtacacctagtttattaggcttaacccaaccatcttccattactccagctttaagaaaggctcgaattaaatggagggtggttttgtcatttacttgctctctaattattgaaattaatttatcatgatttaccgtgtcaaagtatttctcaatatccaggtcaacaacccattgatagccttcgtttaaatattccaagacttgttcaatagcgtcatgagcactgcgtccaggtctaaagccatagctatgctcactaaaatgaggatcatagatcttcattaatacttgggcaatagcctgctggattactcggtcaacaaccgtgggtattcctaaaggacgtttcttaccattagctttaggaatgtagactctgcgaacagcttgcggacgatacttcatcttcatgatggcgtcctttatttctacttgatgctttttaaaatagctatcaagctcatcaactgttctcctgtctacaccaggcgctcccttattgattttgactctcctgattgcttccttgagattgttttgacttaaaatctgttcaattagttccatctcgtgatatctccatttctacttgtaaatttattcagaattgtcccaattgctttcaccatcaaagagttacgttctctttgtgctaggctatcctcttatccggactgtctgaacattgcttatagcgagatatgctcttacaaacattaggcccttcgctccagtttcattacaaaaccttcagcactactacgacctcagctgacttctcgcgattaacctttttcgaccaggcttacgatcgctgatattaaagcttactcggtttcacctgtccacgagatctctcggggtaagacattcatctttaattttccactgccccctggtttaccgtcttggttttacggttgtcctttggactttaacttgtgctgcagtctcatccaccatttggcctgaccaggtttctgtacgtaggctcggaaaactcgctagccacttccttcacccatagcgtcaccgctaacggcttgtggttcgctacacttggcgacaactacccgtgatctagactttcactagactagacaaatgccatgcccgacacacaacgaaaaaggagccaatttgtggctccttttatttgtgctcactgtattcacagtatatacttaaataataaaatatttttagcataaggagggcttattatggtagtcaaggctagaaaacaaggaaattcaatagtgcttaccattccaagtactatcaaagttccacttaatacagaattctctgttgatgtaaataaaaacggtgatattgtatacaaaagaattgctaaaaacaattatgatttatggtcagaccccgcttatgacgattatgattatgatactgaaataaagcgagaataccaagaattaggatacaatcctagagaagtcaaacctgtcggaaaggaactagcaaatgagaaggattgatgtccatcaaggtgacataataatgatcgatgctgaaccacatgctggtcacgaaatgggtggacatgattctgaaaaaggaaatattcgtagacgctatttagtagtgagcagacatgcttacactaaaaagtctggattagtaataggactagcaattactcataaccatattacagatgatccatttagattctatgtgctagattatgctagtcacacaaatggagatgcattattatttcaaatgctatcgtatgatttcattgcccgtcatggaaaaataatcggccacataaaagaatcaacagaattcgataatttactccaacaagtaagaaatattttttcaaaagaataattacttaaattatcatccatcaaccaatccagcgcggcttcctcaagcaacgatcaatcatctgccgtaagttccagctctgctgctgatgataacaagtaaaaaaatagccgttactcacattgagcagcggctattttcattagacctaggcttctttcatcatttgttcaatttgatcccgggaaacagaatcatggtagtcttctgtcagatcctccaaagttttggaatctgatacaccatagctccggttacgataaataattttcttaattgcacttaaaattcctttttcttcaccgtattcacgctcttcagctagcttagtctcatagtccataatagtatccctccaaactggatctgcgttcatttctgtgattttctgccgaattttttcaataaattctagccccagttaagctcatcatactttgcttgaatgaaatctctaaacaaaggtaaggtaaagccgacctttcccctaattattggcttaattagatcatatttaattaattttgcacgatagctattaacatactgcttacttttttgcatagtcctaataattgaactaatactattatcttgcgccatagcgtacaaaaattgaaaatccacatccgttaattcatgagcaattacatcatacgcttggttgaaaagtacatcacggaatctaagtttagtatattccaaagctttttcaaacgtcatcttttgacttaaattttcatacatcaaatctccgatcaattgaaatgcataagcatagccttttgacatatctgccaaaatttctgcttgcttagctgttatgtctaatacatccatgtaagttctggcaattgacgacgcaaatagtttagagacgtgaaatctatccgcccgaaccaagaaggttaaattatgtgtgcctgatagttccgccacttcacttaatagtccggtcataatcactgaaacttgatagttatttaggctccagtcgttgaattcctcagccaatttttgaattgtgggtgtatttgacacttcatcaatacaaaatgcaacacgaatccccactttgttcaaagctttaagaatcttgttaatttctactttataatatatttcatcatgcttttcatttgcttcagtgaaatctactgatacaaaaggaactttaatagaaattgatggcgtccattttttgattttatctagcataggcactagcttgatatacatcattcgaaaaagatcatcagaattgtgcaaagtgactaccatagtatctttatatttttttagttctttacccactttgttcataaaaactgtttttcctgaacctcgtacccctgtaataaagagagaataagttggatgtttcttgagacgatgggctctttgagcaaatttaactgcatcatcattaaaatcaagatatagctctgggatcccgccaaattcagcatcaaaaggattttcattatacatattttccctcattttacttcattttactttttacatttatattttacttcattttactccattttactaatcaaaactgacttctatacttttgcatctctcaaccacttctatttgcttttatttgtagaagtctgtaaaattattattgactttgtatctatttatttataaataaaggggtaacaactttgactgaagaagaaaagaacgctcaagctcaagctgataaagaaaatgaagaaaacgacgactttaaagtcgtaatgccagaagctaacaagactactatgccacaggaagaattcaaagaacaacctgattacttaaaggtcttcgctaacttctacatcgctgaattcgatgaagacgatcttgaagttatcaacctttacgatgaaaatcataacatggttgatatcaatcgctatgttttaaacaacatccacttcccacgcaagaagttggttgatcatgtgttacaataccacgactacaactttaaggacttgcttaaggccatggaagaaaagactggtgttaagccagaagaaatgcttacttatgaagcatgggaaaaatgggacgaagaccaacgtactaagattccttcatcactttcataatttatatcaaaaaggctccctgtatgggagcttttttactgcatattttttattataatgcattaactttatcatcaccaaattctagattcaatttctgacaaatctcacttgcattgtccagcgaaatagacgaaaataggtacaataagggaaaatgtcatcgtggcattttctttttttattaaaactacaattttgttgtgggagataacgagataatgaataataaagctaaacgcatgagcgcggccggcttactaatcgccatcggtattgtttacggcgatatcggtactagtccgctttatgttatgaaatcaattgtcgaaggcaacggcggcattggtaatgtaaatcgtgactttatcattggatcaatttcattggttctttggactgtaacgctactaactaccttacaaaccgtaattattgccctcaaggcaactaaccacggagaaggtgggatttttgccttatacacattggttagaaaacgagctaaatggttagttctaccagcgctaattggtggagccgctattttggccgatggtactttaactccagcagttacagttacaactgcgattgaaggactgaaaggactgaactttggcggcaatgtacccgtttctactcaaaacatggttattgccatcactgtagtcattctgctagttctgttttctatccaaaaaatgggaactagtatcattggtaaagccttcggcccaatcatgttcctttggttcacttttttgggtgtaatgggcgtaatgaacatggtcggtgactggtcaatcttgcaagcaatcaatccaatttacgctattagattattagtcagtccatataataaggctggaatttttattttagggtcaattttcctagctacgactggtgccgaagccttatattcagacgttggtcacgttggtaaaagcaatattattggttcttggccatttgtttttgtttgcttgtcactcaactactttggtcaaggcgtttggattttgaacaacccaacttaccgtcctgcagacggcggtgtgctcaatccattctttgaaatgatcccagctaacatcagattgtttgccatcattttggctactattgctgctgttattgcttctcaggccctaattaccggttcattcactttagttgcagaagcttcaggcttgaagttcttgccaagaatgaacatcaactacccatctaacgaaaaaggacaaatttatattccttccattaacaagggtatctgtgttgctactatcgcaatcgtcttatatttccaaacttcagctcacatggaagcagcttatggtctgtccattacaatttcaatgttaatgactaccatcctgctttatgaatggttagtaatgaagaaagtcaacactgtttggaactggatcttcttgatcttcttcggtgtccttgacatcatgtttatgatttcaagtttgactaaatttactcatggtggttacgtttcactcttcatcgctggtgctatcggcttcataatgtatgtttggtattacggcaacaaggttcgtgacaagcgtgaagctcgcaatgcttacgttcgcttagatgaatataccgacatgttaacgaacttaagtcacgatgaaaattacccaacttatgctaccaacttggtttacatggccaacgttaagtacaataagttcatcaaacgtgaaatcctgtactcaattttggataaaagacctaaacgagcaaaggcttactggtttgtcactgtcaatgttactaacgagccatttaccgctgaatatgctgttaacacttacggtacgaagaacgtaattaacattcagctctacctcggctttaagaagcaaactagtgtgaatgtctacattcgtcagatcgttcatgacttgatcgccgacggtacgattgagccacaaccacaggaatacaccaccagcccaggtcgtgacgtaggtgacttctcattcgttattgttaacgacgtcatcagtccacaaacacaattggttggctatgaaaaatggcttgtggaagcgcgggttcgcttgcaaaacttgtcttctaacccagcttcctggttcggcttagaatacgccgataccgtaatcgagcgtgtaccattaatcctgggtcgaccaaatccatcttacattaagcggattaagccaaaggattactcgacagctaaaactaaataattactaaactaaaaagtgtctgggaaaaaactagcttccagatgaataaaaacgatcaagatttccttttttaagaatcttgatcgtttttttgttctctttaaaatttttaacaataaaaatcggcccttcagccaccttctttgacaatatttgttcaaattcatcatcataaaggcaattccgatatcggtttcgaccttctctttacctcgcaggtgcgttctgcgcatgccaaatacgttcttcaaatgtccgaaaactggctctacatcatattttctcatgccatagatgtgtctgccttcttcgctttggagaacttcttttgctttttcttttaaatattgccagttaggattatagcgaacttggcgctggcggccgctagctgttttagccaattgttccaattctggcgttagctggaactcgtctgcctcataaaccttaaaatcacggacctgaccagtagaacgatccttgcgctggctgtaatatttgaaattgaatctgacgccatgatgatcaatgtaataatcatctttttcattgtagtaccagttgattagcttagttggatcattcttatactttttggtctgttctttttcatacatagtgtagggaataaagtacttcttgtctggatatttttcctccagcatcgaataattgtattcactgccatagccagcatcggcgacgattttgtcaaacttgtccaacacggtcatttgatccaaaaccggctccaaagttttgaaatctgtcggattaggaaagatggcataatcaactacatattgatcggtcgtgactgcttgaatattgtagccaggctttaattgaccatttttcatgtggtcttccttcatatgcataaaggtggcgtcatgatctgttttggaataactgttgcgtccggcaaagatctcttcggcttcttcatatttttgcattcttggcacataatcttttcttagccggtgcagaatcttttttagtccacgtcgcttggcttttcgaggtgaaccgccaggaatggctttgttttcctgctcaatctctttagtcagcttgttaatttctgcttcagtttcttgagctaattcctttagcccctgactagtttgaactttttctttttccatttctttgactacttctttagtaatcaattcatcataaagttcaactgcctggcctttcagcttttcatgatacttttcaaccgctttgcgccagacaaatgtatagcggttagcatcagcttcaatcttagtaccatcgataaaagcagcaccttcattgattaagccttcatcttctaacaggttagtgaagtagataaagctctttttaatcagttcattggcatggctgcttgatctaaaattattgatagtatgatatgaaatcttttgctggtcagccaagatcatcattggcagattttcttccagcatcaactcaatctttctgccagaaaaaactcttctggagtaagcaaaaagcagtattttgagcatcatggctggatgataggctgggcggcccgttttagcagtcttgcctactaaaacatcttctggaattgaatctacaaaccagctgatgacattagccaaatgattggccggaatggcaaaatctagattaagtgttaaagcagtttgacctgtgatataattcttgtacatgttagtttccaccttttttattttgtgatgatttaataatatcaaggctggagctaaaagtatacaaaaagagcgttgaaacaaaaattcaacgttcttttttcatgatctgagacttagttttttcccagacactttttagtgcaaaaaatttattaatgggtaataagttataaagggctgcagtgtagtagcagcactgtagtcattcttgttataggagcttatatgtaatttagctaatttttcatactcgatattaagaaaagttacttaccaaattactactctcttttcaggagcaagccacatgccatcgttttcggtcacatcaaatgccttatagaattcttcttggcattgtgattgcacgttagcacgttctggacctggtgcgtgaacgtcgatagatacttgcgtcttaattgattctggcaattgcttagttgtccaaacacgagcaaagttttcaaacaattcttgcattgccttcttgtcgccaccttcacccttgttagcttcaacagcagcagtcaaaccaccttgatcggcaatgttttctgatacgatttgcttaccgttcaaggttacagggccatattcaataccatcaaacaagtcgatttcagcttgcgttctcttcttgaattcagcaaaatcttcatcagtccaccaattcttcatgttaccaaactcatcgaattgagcaccgttattgtcaaaggcatgtgatacttcgtgtgcaataacaacgccgattccaccataattagtagcacgactttgtttcaagtcatagaatggtttttgcaaaattgcagctgggaaagttaaatcatttctttgtgggtcgtaacatgcattaaccatatcacctggcatcaaccataccgtacggtcaacatcttggtacaatttctcaagattgtacttaatttgttcccgaccaaattgcacttcattttcataaaggctagcagttggatcaacttgtaaacggtcatagatttcttcaatcttgtctggataaccgatcttcaagatcaaagcgcgcaacttaacgattgccttatccttagttgcttgagaaagccatgaattttcacgaattctcttttcataaacatcaagcatcttgtgaatcatatcagtcacgtctgctttagcttctgcgccaaagtaagtttgaccatagtagacacctactacttcgccgaagtcaccattagtaatatgatatgcctgcttaacgccacttgaaagctcaggttggcctgacaaagcttgactaaatggaaaggcagcttcacggaaatcttgtgacaagctgtaagctacgccattaataaacttaaccagcatccaagccttaatttcagcaaagttttcttcattcaacaattcttccgcgtgatctaagtaacgtggttcagttgaaattatccgttctggcttcttggtaaataatccgcccaagaagtaatccatcttgaaggaatcgaattttgcttcaaagtcagtcaatgaaactggattataagttgctgggtaatctgcccattcttcagttgacttaacaaccttagcaatcttagcgtcatacttaattgccaagtcagcgtaatcttctgcgtccttttcatcaagtccggccattgttaacaacttaatagattgctttttcaaaacatccaataacttctcagcagctggagtcttgtaagtagtcgtatctggcaagaaagtacttggaccaccaaaattcaatgagtgaatcttagtattcttcatatctgcttcaacactgaaagcaaatggaacggcaaaaccattcttgtaaaaatctgctgccttcaagttaaagtcagcgaagttgcgcaagtctaaaatttcgtgcaaatctgcctgaataggtgcggcaccatccgcatttcgcttgtcaaagtttttagcaaccttgtaaagctcaactgccttcttgaagttaggcacagtaggcagttccttcttaccagcagcaaaatctgcaaagtcttgcatcaagttcttttcaatattaagatcgatcccatcaaatgaactggttcttgaacgatcagatggaattttagccttttccaaccattctgagttaacggccaaatataaattatcttgtagacgcgctgaagtattagccttagtaatgtcaccagcaccgccgcgtacgttaaaatacattaaattacctccctagtggaaaaatttttcatataaagacatgatagcattataaaaaaattaacgctatcatgttgtttttattttcccggatttaaaattgaagtgcaacactaagtgttaaacaaaaaggccatgaagacctaaacttgaagtgacgaaaaatcaagaaaggaagatcttcatgaccaattcaaattctagcatttctaagcactatcatcaattaaccagcgtacaacgtggacaaattcaagcaatgctggattccggcataacttcccgtactgttatcgctcaagaagttggctgccataagtcgacaatcagtcgcgaaatcaaacgcggaagcgtcctgcaaagagacagcagctatttattgtatgagcactattacgctgatactgcacagatttattatgagaagcgtcgcaaaaactgctatcagcgcaatccattgaagcattatgctgtctttttgagaatgctctccagacgctttaaagctaaatttgatgccaccagcatcgatgagttcgttggtgaattcaaaaggactatgccaggctacccttgtcccagcacaccaaccgtctatcgctatattgatcagggcttgctggacataagcaatattgatctgcctatgaagctcaaaagacgcaggaacaagcgtcatcacagccatggcggtcacgctttgcacaagaagcatcttggcaattccattgaacagcgtcctaaggaggttgaagacagaaaagctccgctgcactgggaaggagatctggttaaaggcgtcagacgcaagaatcagcctgctttaatgactttgactgaaagaaccacacgctttgaagtagttatcaagattcctgactatcgggcaagcacatgccaaaggctgcttcaaaaggagattgacagacatcctgcctggtttaaatcaatcacgtttgacaatggctctgagtttgcggatatgaccaagatcaagggctgccagatttactttgctcacccatattctccatgggaaaggggcaccaatgagaactgcaatggtcttttgcgtcaattcttccctaagggcaagagcatgaaagacaagtcaaaagcttatgttcaacaggcaactgatgccattaaccacaaatatcgccgaatcctccaatatcacacagcagaggaactcttcaagcaatatatctcttcataacctaactgttgcacttaatttgacaattcaggttgtttttattttacaaataattttagttttttctgtagtttcgcatgcattggaataagcatgactaaaagcaaaaagataccaattgcagcaacagcaaagaattgaatatagccgaaatcttcaatgattaaaccaccaaataatggacctagagctcgaccaattgacgatgcagacaaggttaagccttgatacttgcccttactagaatcgggcgacagatcattgacataagttggaatcgacggcattgcggttgcttcgcctaaagttaagataaccatggataaggcgaaatgtgcaaaatctttggcaaaaatcaaagtaacaaaagaaattgcaaacatcaaagtgccaaataaaatttgtctaaataagctcttaaagatagtaaaacgacttaagatagcttgcacgatgacaataattccggcattgatggtccataacaaactatacagatgaaaaggaatgcccaaagaaaccatgtagacagacaagtttgattcccagttcatgtacatcaaccaaattacagcgatcgtaacaaaaaagccaattgacataatcagattgtattttggcatcggctcaaaggccttcttctttgattcgcctttgttagccaaacgctccttgtggaactgaatcattggccgataattaataattgcgttaacgcaaacgccaacgaataaaagaccagcaatgacaaataataaagtcactgaataatcataaagataacctactgctaatgtcccacaaacgaccccaacattttgagcaaagtagatcatattgaagacataacgacctggcttagatttaatactagtagcaatcgagttaatcaatgctccattccagccacccaaaaagccagttaaagtcatccagagccaatataacggccaactatgattcaaagccatgccaaacaagacagccgcatctaaagcagcccccacaatcagcaagacatatggatccatatggtcatagcaccagcctgaaataaatgacccaatcatatttgcaacacagttgaacagcaaaacgacacccactaaagctagtgaaacgccaagatggtcgtgcaggtaaactgaagtaaatggccaaataaagctggaacccaaccacgttagtaattggcctagaagaagccaatgcaatttgatttcatcagctggttgttttccatgtgctgtgcgcattttctctcttcccttctttttaatcattctctcaatctagtctagcaagaattgtgattttttgcacgagggcaaaagaaaaagctgcatcccttactagaacacagcccaacaagttaaatttttttcttttcttcagtccagcttctaatttctgtcacatcttgtgctacctcaagacaacccagatactttccatttttatcacgtactgcataatagcgtaggtataagcagcgcttcatcttgtgtggagtaaagtgaaactcatacttgtcaacttcacctgaatgaaattgcgcaaaaatctttttaattaacggtctacttttagcagtatgacacgagaatacgtcattgccaatagcattgcgcgagtgcggataaatctcagcaccgccgccaaaataagctaccttatcgtgttcatcaataaaggtcaatgcaaatggcaacatatccaaaattgcatttaactgctctaaatttaaccttccttcttcaaaattaatgaggaaggatgaaagattgctaacagaaataggccctgcttcttttttagcttcctttggcttccaattcattggcttgcgaatcagggtatagccaatctgactctcttcgcgtttaacgttgtaccaatcatcttgatcagctacctcgtcaatcatcggaatcataatgctctcctctttaaagatcatctcaagcacttcatgactcgcctttttaattgcctcagccaactgatctttatctggatgctcctcaccagcaatcttgcttgcatccccaattaaatcgcgaatatcatcatcaacgccccacatcacttcgggcggagctgtaatgccatatttattcattaatggaaaaagcgaggtctccttacgtcggtaatgcttatcgattgttgccaaatcactcaattcttttctgattttatccagtgtatcttgacctgcttgatactttttcaaatctggcaagagtgcgtcattaaccaatgatttcagtaccatattttccagcttaatcgtatgcaccgggtgccccggagtagcaaaatcaggatttaccgcattctccttgatattacccttaaagacatcggcatgcacattacacaggtattgaatctctgctgggtttaacccctgcttgattaattcgcgctctgccgctgtaatttcggccacatcaacctgatcgaattcttcttgaaacatcttctttgcggtcgcaaaatcgccgccgttttgaatataatgcaaaattttcaggattgcgtcctgtctttttttatcagtcattgattaccttgtatcctttatcttcaaatgcttttttcactttagccaaatcaagtttcattgcctgagctcccaatggaatggtcatcacacgccccaccgttttaagcaatccaggaattttaattctagtaaaaccacaatcgtacataatttgaacaaagtcagggtattcatctgccattttcttgatcggtactgaaaagtcgataatcttctctttggtggctttctcctgcttaatttgatcatcatggttagttacacctaattgctttttagctgcactagaaagacgctctgtcgtccagacgggataccagaccagcttaatgtcacaagacttaattccagcaactgaaagaacagctttttgaatatgttgttccaaataatcagataaagggcaacccataattgttaaagtcatcttaatggttgccttatctccttcgatatcgatgccataaatcagaccaagatttactacatcaacttgtaattctggatcaatcacttgggtcaaggccgtcatgatttgatcaacttgtttaatatttttttcttccattttttcacctagcaaaaaagtccagaaaatcattccggactttagtttatcttatttttgcaatttatcccagatgacaaccttgcctgccttcatcgactttggcacatcaataattcgttggttactagaacctctgaattgcagggttaaatcctttaaatcattcataaagcggccatcaactagaatatctatcttagacaacatttcctttttatcaggtgtttctttttgcaattcatcccaagtatatccagaccaggaccagatgtccttactgtggccaaattcttttcgaattcggttaataattcttaaacaaacccaagtattcaagaatggctctccgcctagtaaggttaatccctgcacgtatggctggcccaagtctttaataatgcggtcttccaattcttgcgtatatggaaaaccataattaaagttttgggctgctaaattatagcaaccagggcaatcgaacaaacagcctgaaacataaagactacatctaacgccttcaccatcaacaaagttaaatggcttataatccgcaattttatgtttagaataatcctcagtcttccactcttgtggttttggatttttcggcttgcggtgcattctttttaactcacgttggtgatctaactgtggcttatattggtcaggatccacaaacatggtatccccacccatattaaccttgatcaaattactccggatatctggtccttcttgagtgtttttatctttttcaggcattagtactcacctttttttacttcttcttcggtagctaaactatcttccatgccaaagtccatatgcttaacccggtgcacgatttcttcatgacgaccgtgaaccattggccgcttcaatgggttgcccaagtagccacaagttcgcttgacacaatcacaagtagcaggatcatgattaccacacttaggacattcaaaacccttggcagtagacttgaattcaccagcaaaaccgcacttataacatttatcaattggcgtattagttcctagatagcctaccttgtcataagcccaatcccaaactgcctcaagggctgctggattttgcttcaagttagggtactcacaataatggataaaaccacctgcagcataatatggatatggtgcttcaaaagtcaacttttcaaatggggttgggtgcttacgaacatcatagtggaacgaattagtgtagtattccttatcagtgatgtccttcaccttgccaaactttgccgtatcgagccggcagaagcgatcagttagactttcactaggagttgagtacaaactgtaatgccaatgatatgggtcctctttttcccacttagcacacaagtcatgcattttcttcacgatctcaattgtaaaatcatgtgcttcttcattgtgttcccaatcagggccataaaagactgtccctacttcgtacaaaccgatgtagcctaacgaaatcgtagctcgaccatttttgaaaagctcgttaacatcatcacctggcttaagtcgtttaccaaagacgccatattgatacataattggcgcattttcgggcttagcttgaattgcacgtctacccttaaaggctaaagcttggtggcaagtccgcattctagtattgaagatttcccagaataacttcttatcgccatgactctccatggcaattcttggcaagttaacagttacaacacccaagttcattctgcccgagttaacttccttaccattttcatccttccagccttgtaagaatgaacgacagcccattggaaccttgaaagaacctgtaattttcttgatcgtatcatacattaaaacgtctggatacatccgcttagttgaacattgaatagccagttgtttaacatcgtagttagggtcccctggatgtaagttcaagcccttcttaatggtgaaaactaatttagggaaaattgcggttctgcgttctctacccaatcctttaattctgatacgcaagatatctttttgaatttctttttcaatccaagaagtacctaaaccaaaacctaaagtagtaaatggcgtttgcccttggctagagaacatggtattaatctcatattccaagccttgcatggcatcgtaaatgtccttcttagtttgactcttagcatattcttccagcttttcaggatcatcaatgaacttgccagcatcctttaaatgcttttggtagtttttctctgcaaaaggagctaacacttcatcagctcgatcaaaagaacagccaccatattgactagaagctacattagtaataatttgcgtaacttgatgtgtagccacattgattgagttaggactagtcatataggcatttccaatcttgaaaccattagttagcatatccttaaagtcaatcaaacagcagttagtcattggtgaaagtggtgtgtaatccaagtcatgccagtgaatatcaccgcgcaagtgggctttagcaatgtgctcaggcatcatggtcaaaccaactgttttaccaacggtcccggcagttaaatcacgttgagtactgaagacctcactatctttgttggcattctcgttaacaatcgttgggtcaccattaaccattcgctttaaccgtgcacgagtatcggtttgtttaatccattcctcttcatcgtgcttgcggtattgcacataagctttagcttcatccaaataacccaactcatttaggctatctctaaaagcaactgctacatcttgtgcatttacttcatcagcagcatctagtttagccacaattttttcaattacagcaggtgctacattatctaaatctaggttatgcaaaaccatgttgagtttaaaaattgcgaacggatactttgacccatcacgtttaacaaaagttttaggcgtattaaattttgttacattttgttggttaaattcttcttttagcatttcaatcactccaaatctcgtgtctttatcatagcataaaacacaacatcttgtattgtgttcaaatatagatgaatatatcttgtattaaccaaaagaccattaaatttggaaatgattcagctaaaattttttagaaaaaaagagaggcattttttacctctcaatttaaactatttgtttaattttttattttcttcgtcaaagatcttacccttattaacttcatagtaagtcttgtaacgtttgaagtagttatggaacatgtacttcatcaataaccagcgcttgaagtttctatccttgtcataaaagacagtagtaccatagcggccctcacgaataagttcgtcagcagtcgtcttatagtcgttgtcataagcataattattgaatatcttcttaggcacgcctaaccaaagcttgtatttagattcaagcttattaccataaactgtttccttatctttcaaggcatcttcaacatagtcatcaatgtaccatttagccaagttgtaaccgttcaaagttacgtagaagctagaacgtccctgacgtaagttgatttcgaagaacttgaattcaccatcacgtggatcatatttgatatcaaagttggccataccagtgtagttcaacttttcaaggaattgttgtacttcttcgtacaatttttcattgtactcaggcaaaatcgccatgtaattaccaattgattgtggggttgggtcttccaataatgggtgccctaaacacatcatttttacttggtggttcttatcaacataagcattcaaggtccgcatgttagaatcatcaccaggaataaagtcttgcaaaataaggtcagcgttgtagccatgagtataaatcttagttacgatatccttaaattcagccttatcttgaatggcaaaagtcttcttccgaccttcaaattgacacttcaaccatgaaactggatcttccggctttaattccactgggaaatcaaatgggacatcctcgtacttacctgacttgtagtcatccatcgtaatgatcttagtcttaggataaggcaagccatattcttccgcaatttcataaaagccttccttagagattaatttttcaagtaagtcatattttatgtaaggaacgataaagacctttttcaattcatcttggtgcttagaaagcaactcagcatagccatcaccacaagcaatcaagataactggctcctcgtgattcttgtattcttccatctttttgtgcatcacgtccataaaagtaggatcgctactaaagccatgatgcaattcaacgtccacaatgcttgaataacgagtagcagcaagttgaacgtcagctaaggccttcactttaatgccatatgcttcattaaatgaacgtgccataccatacacgttgatatcactaccgagtaagatcggcgtaaattttttactcatcctcaaaaaatctccctagaattatagtaatttaccctgtgaaattagcttagcaacttcaggttgcacgtgttgatatttcttaactgtgttttcgtaatcaacaaagaacaacttgtaccaaacaaggaaggtatagatagcccagatttgacgtctatgtgagccatcaccttcatagttgtcgtcaagtaacttgataatcttcttttggtcaaaaatatcgttgacaaattcttcttcaaaaagagcatgaacttgtttgtaaaaacgtggttccttcaaccattgcttaattggagttgggaagccaagcttaggtctcttagcccactcatctggtaaaactttttctgaagccttacgcaaagcatacttggtatcatgacggttaaccaagtacttggttgggatagagttagccaattccgcaatcttcttgtcgaggtaaggaacacgaacttcaagtgaatgggccatcgaaatcttatcagctttttgttcaatatcgttaagcataaagtggtgcaagtcaatgtattgcatctgcttaacattatcgactccctttactttcttaaagtctttttggtaaatgccgttaacagtcaatttattgcgatacgttggctgtaaaatgctattagcatctttagaagtaaagatagttgggtaatccatgtcatagataaccgattgaccgacataaaattcactcggttcagctaaattggtgtacatgtgaactttacctgggaaattaggcattctcttaatcttgtgtgccaatttaacccgcttcttctcaggcaactttttcaattctgaagtaaagaccttaataatgtcgttatgcgtatgcatcccgtagttcacataaccagcaaacaattcatcagcgccttcacctgaaagagcaacagtaacatgcttacgagctagtttacacaagtaccagagtggaatgattgacggattagcatctggttcatccatgtggtattgcatttctgggaagtcacgcattgcttcatcagcatcaaccttatcgctgaagaacttccagtgattaatatctgctaatgccttagccttagaagcttcatcataagttgaatcatcaaaacttactgagaaaacgtcatctgggttaagcaaactagtcaagtatgaagagtcgattccttctgataagaaagtaccaaccttaacatcagcgtttctatacaaatcaaccgtttctttcaaatcttcgttgatcttttgcaaagtttcttcaaaggaaaggctattttctttatattcagcatcccaatattgatgggtcttcatttcaccatctttgtattcaaaccaatggcccgctgggaagcggtaaacgcccttaaagaaggtttcttctaggtcattgtattgattcatcaagtatggcttaactgcttcaacatttaattcccgcttgaactttggaaattccaaaaagctctttaattctgaaccaaccaacaaatggccattttgattactgtagtacattggcttaatgccaaagaagtcacgtgcaccataaagggtcttgttgttgtcatcccaaattaagaaggcgaacatcccacgtacacgcttaagcaagccatccatgccccattcttcataaccatgaagtaagacttctgtatcagccttagtagtaaaatcatggcctgctttaattaattcttctcttaatggcttaaagttataaatttcaccattaaaaataattgctctagttttatcttcattataaataggttggctacccccacgaagatcaataattgataatcttctaaaaccaagggcaacctcgtcattagtataatacccgtcggaactaggtccgcggtgtttaatcgtggccatcattttgccaatgacagcctgcttttcatttatctttggatcataaaacgcgacaattccgcacataatttaaattcccctaagtcaattctctaaatcttaatatttgctataatattcactattttttactttaacctttttattataagctaaacacttgtaatagccaaatacctttactattccttaactaaatgaaatacacccggcgtctagaagctgcaccatagccaaaggattgaatgcggtgtcgttttaaatcgacgttcacaatataacccgcaaattcattattttgatcaattcttcggtctaagtttttgttgtatttagttgttagcgaatgatttggccccatcaaggcagaacagttaaacaaaatatattgaatcccgttgatccgatactggtcttcacgatgccgatgtccgcagaagtaggcaataattctcgcattcttgatattggtaaaatcaaaatcatttgataaacgaaattctgttggaacaccattgctagcgtgcattcgacctttttcacgttgattaaaggcaactagcagttcatgcaaagagcggccattatacttaagtgcattagacccctttcgattaattgggttggcatgggacatgaagatgatctttttgttggaagaattagccaaaatttcgataatttcctcaatttgatcttcacgcacagccaatacaatcttattgtcatagcgcttttgcccgcggttatttaattcatatggaacatctgacgtattaactgaaatcacccgcacgtcatctaaatcaaagtatgccaccccgtgctggcgcgaaacataatgaattcctcgttgccggtacatatcgggccacataatattttcgaattcattttctggaaatgaggcttttaaatcatgatgttcatcaaacttatcattttcatcatgattacccttgatactcaaatatggcacctgatccgacttaaaagacttgttcagcttgaccaattcactttcactgaccaggccagcatcggagccatcgatccagtcacctaagtggacttttaaatctagcaagccagattgatctaaataagaaaattcttgcacatgttgcagcccattaaagccataaaaatcgctgctatctttatctttaaagtgagtatctgtaattacaccgatattgaccgaattagtgcctgggcgaatatgctttttcacttccgtagtgaaattatccaagtaattttccacccaataacggcgccctgtcttcttattatgaaaggcacgaaaatgacctagttccgcattatacttgcgtaaatattccggtgctaatttcgttgtactctctggactaagtgcttgtcgcaaaacgccgtcttcgtcttgataaacggttaaaacatagtccttaccatgcggcgtaccatcaacggcaccaacatgatattctccaacagtagtatatttttgcatcggatcaagcaattcactatctttatccattgcagagcgttttttggcgccaacgattcgatcaactattccctttatgtgtttaaacaaattcatcttttcgcctcaaaaaagcaaaaaaagccggccgcttaccagccgactcaaataatttatgcgttgtgtgctaaagcatatgcggcaagtccaattgataatacagcatctttagacaatacttcttgcaagtccttagctgcaattgcttgaaccgcaccaataactttcaagctgtaaacaatttcacgataatcagtagttggatcgtataaatcatcttcatatggattctcatgattgtaggtcaagttgatctcgtccttatcaacaaaaccatcaacatggttagttaaaatgcgatcatgcaaatcagtcaacttactgtccatcttgatcaaagttagtttgtgatcgctttcagcttcataatattgttcttcagtcatgtcgaagtaatccttgattgggttatttaaaacgcccaagttatcgattactttgtaaacagcttcagcgccaaagtcttgttcgccatttaaaattttatcttgtgataaggctaaatcatcagccaacatcatggtatctaatttttccataggatcctcctcgaaattcacacctaattatagcaaaaaaagctgttaaaacccttatttcgcacataaaaatataatttctcaaaaaataatcgcatttttttgcgtaataaataatagaggggtaaaacattacttacatagaaagagagaaaaatatgaatcaagaaattattcgctgtccatggggcgatacaaaagacgaagcagtacaggagtatcacgatcatgaatggtgcaaacttaatctagatgagtcacatttgtatgaaatgcttgtgctcgaacttttccaatcaggtttaagctggtccacagttttgcataaacgcaacaattttaaagctgcattcaaaaattggcagatctctgaagtcgcaaagatgaccgataaagatatcgagtcattaatgcaaaacaagggcattatccgtaatcgaatgaaaattaatgctgctgttaaaaatgctcgggcatttttggcaattgaacaaaaatattgttcagtcgccaaatatttacaaaattttgtacctactccaattgtgcatgatattgccagctttgatgacgttcccgcttctaatgacctatcgcagaagatatccaaacaaatgaaaaaagatggtttttcctttgtgggacctgtagtcatttattcctacttgcagggaatcggattaattaatgatcatcttaatcaatgccaatttaaatttcacggctaacaaaaaagcggggacttttcgtccaatgtcattaagttaagacattgactaatctgatgacactttttgagacatttatcgaattattttattcgataaatgtcttttttgatagcacaaataagccatcttaagatagtcgtttaaattagttcaagctgctagacgataaggaaagccaactactaatttaacttttagatttcgtttatcttttcttcctggtcgaataggcgttaaataaaatgccacatccagcagtaattgtgtgaagtttttatctgaattatcacttatactaaaatatcgtcgccagatacaacaggccattttaaaatctatttgatattgatattttccctgagtatacggttttgagctcgcaattattgataaactcacggcattatacattgcaaaatgggcgtatatttccatataaacaaattgatcttttttagaatgaaactgtatgccgcttaagtcatatttaagctccctaaaagaagtttctattccccagcgaagatgatagatctctttcattctagctagaggatattcatttcgatataaattggtgatgaggacttcccactcatcgtctgaacctggtggattgattctaaacttacaaactctaaatctaacatcacacatatcctcaaaatcccagcgttgatctctggtattttttgaacgaacagctttatagtgatgctttttgtgaagaatcaggtgaagaaacttttctgtatctttatgggtgacataataataatgtgacgaagttactctgcatgataagtcaatatcgtattcatgattcgacatagctacaatttctttaaaagcaccatctccggattttgatcgcataacatagtggcaatgttttaatcgattgcaattttcaattaaattaaagctaatatagccacgatccatcaggactaagaaatctttttcttgttgggctaatttctttaacatagttaaggctgcctcacgttcatccattttttgtctgggttggataaccatgtctaaatacttaaacttcccacacgcaaaattgcttgtttcattgtgattctgcgtgttttgacaaatataaaaggcacaagtccttttcattgctataattatattgaccaaaacataatttatttgcatgaaaggcttgtgccaatgtctattttaccatctcctgaccaacaaaatgaacaactattttcaaactcaatcatcagcttcatcaagaagtttcaggtgatcaagctgttgagaaaatgtggcttccgcaaggaaaaaggcattagcctgttcagcttgtttctttacgttttaagcaatgtctttcgtgaccgcagcttatatatgcagctgaaaatggatcattttcaagaaaatttttccaagaactcatattaccgttttatgcgcaacgttcacgtcaattggctccacttcaccacacttctgtctgcgcaaatcattaataaccacttgcgatctttgacttcagaaaaacgggctgattgctttgttgtcgatgattcctacttctctaggaccggcttcaagaaaacagaattagtcgccaaagtttttgaccatgtatcaatgacttacaagaaaggttttcgcatgatgaccctgggctggactgatggagcttctttcatgccaatcaattcagtgctgctgtcttctcagaagctacagaatatgattggcgaaaataaagtttttgatcagcgcaccattgctggccaaagacgtatgcttgcccggactaaaggcacagacgtgatggttaatttaatcgaccaagctatgaaagcaggtcatcaagccaagtacgtgctgtttgacagctggttctcaaatccacatcaaatcgtccagctcaagcaaaggaagctggatgtgattgccatggttaaggttagctccaaaatcaaatatgaatttgagggagaacgcaaaaacatcaaacagatttatcgcagctgtaaaaagcgatgcggccgttctcgctacctgctgtcaatcccagtcaaagtcggacgccaggacaaagacggtgctaaaatagatgcacggattgtctgcgttagaaaccgtgccaatcgcaaggattggctggcaatcatttgtaccgacatgtcgcttagcgaagatgaaattatccgcaactacggcaagcgttgggatattgaggtttttttcaaaacttgcaaaagttatctaaaactaagtacggaatatcatggcctgtcttacgatgctttgaccgctcatgttgccatagtttttactcgctacatgcttatgtcagttgccaagcgggacgatgaagatgaacgcacgctaggcgagctgttctattgcatgattgatgagctggcggacattacttttagccattccttgcaattgattactgatgcaatgctggccagcgtaaagcaagtctttcatgccagtgaagcacaaatagctgaattcacggctgactttatcaatcgtttacccaaatacatgcaaaaattgttaaagaaaactagcaaaaataatatagaagcctaaagccaagcaagatcaagagattactggcttatttagtgtgggaagtttaagttactacttgttttcaaagtcaggctttacggattcatgtacggaactggcagaacaagtggggtgcaagttgattagttttgatgaaatgtaatatcatttttcctattatttttatctgttgtgatcggagtaagtactggtgtttaaaaaaggcgataatgttgtgttaattctaaagcctaatggcaatcttgaaatgaaaaaagaaaaaactaatttttgggacgaagtatcaaaaatgtctgctaaagaaaatgtctgctaaagaaaaaagattgcagattgaagatttgggatatgatccattagaacaaagatcaaaaggtagagaaagaattgaggattaaaagttagaaaaggttcttggaatcttttttgatgaatttaggtaatctgaaaaaagaaacggcaccgctagataattagcgatgtcgttttagttatgcttagctatattagtatgtctgcttaatttatttaataaactgcgccgtcgtagaagttgtaacgagggcggttgaagtcgaagtcttttaattcactgatcttaattgcgttatcgcaaacaccccagctcattaagttgattggcttaccgtaatctccatcaggaattaccaacaagatgtacttgccttttgaaagggcatagccaagttccattcccagaccaacatcttcttcttcaggcaagtaaacgccaagcatgatgtcgctggacttaatccctactaagtcgttatggtaggtagctgatgcccattcaatgtcgtgcaagtattcagggtgttcatcaacgcggatacccttatattgattatcaagaggtacgtagctgttttctaagtcaacggtaggattttgctttagagcttccattgcttctttgtaagccttattttgcttttcgttgaaccaaccggcaccaaagtataaagtttttgtctttgccatatttttctccctttaaaaatgatttaccttaactttaccatcttttgggttgaaaaaaacgtcttgttaacttatggtgaaaatgttaattccacattagtaaggaaaaatccaatgactaatcaaaatctttttgcacctgatgcagtatttatttctaatcaaactaagcaagatttggtttttaaagaagtttacgagcatttacgcgaaagtggctatgttaagggaaactttttacaccatattgtcgaaagagagcataattttccaacgggattggatactgcaacactaggtaaaaatattcctaatattgcgattccacacaccgagggcgagtttgttaacacgagactgattgttccggttgcgctgaaaacgccagtcacttttcataatatgattaatcctagccaagcaattgaagttaaatttttattcatgcttttagataatgacccagatgggcaagctgcattattagctcaagtgatggattttttggctaatacgccagccaacgaattgcgcgaagtttttaattttactgatcctagcgcgatttatgcctttttagagcaaaaatttggtaagaaaaaagaagactagtttttagccttctttttctaatcttcaagataaatattacgcaacttcatgatgtctgcacttgagagcttcattacatcgcgtaggtagttattaataccgccatattcatcgtttagtactttaacagcatggtcaaggtattcactgcggacactctgaatgtcacgaatcgattgcagcacattttcatttttaccattttgacgggcatgttcaaccatactgtcgacgaaatccttggtagtgatgttggttaaaagatagtctttcttaatcgtatttagtggtacgccaagagcagataatgcaagtaatgcaccgaagccggttctatccttgcctgcagtacagtggaaaataacactttcgccatccaccgtattttcaagcaagacatcgaagaacttgcgatatgccttttgtgcaggttcactttcgatcatgtcttcgtaagcataatgcatgtgattgaagccaaaatcagcgtcgtcgtgtgcttgtgtatctaagtcagttaaactcttggatgaattggttaagtcttcactgaaaacaggatcgtaaatgtattctacgccgtctgggacacggtctggttgattatcaacttcttctttactacggaagtcgacatcgtatttaacgccgtaatcagtcaaaaactgcttgtcgaatggtgaaagatcggctaagttaccagttcttaataacttgtgcatcttgattttcttgccagacatagtttcgtagcctccaagttcacggaagttgcgtccactagttactccgattaattgattagttaattttttagtcaaaaaaattctcccctttctgttaatgaatgtcatgaatattattttagcaacaaatcttcaagcaaacaatcaattaaaaagtaacggctttcaaaattatgctaaaataaagggtaagtactagtgcaatttataggagatgaattaacgtgacagataaaacaaaagaaagcattttagttccagttgatggctcagaatcagctgaaagagcctttgacaaggctgtaaaagttggtttgcgtgatggtgctcatgttgatgtattgaacgtaatcgatacgcgtcaatttatgggtgaaatgcaagacactttgatttcaggagataccatttaccaaactcttcaagattctgaagaatacttgaagagtttgaagaaatgggctcacgataacttcggttttgacgatgttgattatcacattcgttatggcagtcctaagcgcattatttcttacgacttcattaaggaccaccacaatactttaattgtgatgggtgctactggtttgaatgcagttgaaagaatgttgatgggttcagttactgaatacgtaaaccaacatgctttagctgatgttttgattgttaaaaccgatatgggaaacaatcctcttaagccaactatgaaaaagaactaatataagaataatcgccaaatgattctaaattcattggcgattatttttttgaaaaaagttgcaaaataccttgatagaacacgaatgtttctggtattattttatcaaatgaacgtgggaacgaaaaaggggagtgaaagataatgtttatgcaatcagaacaatttattgcaaaggatgtgtctttcgctcgtaaagacgttttttctgttcgtttagttattagaaacgtcattaattaggcttaattattgatcgcctttggcgacccgtaattaagtctttttttgtgatgtagagtagtttgttttatcactgtgtatttatgtttatggaggacataatgaaaagatttagaagaatcttggtagcagtagttgcacttcttgtagcagtagttgcaactgcgtgttcaaacaagagtaatagttctaagggtggttataccccaaagtcattaactattcaatttgtaccaagtcaagctgcaactaagttgcaagctcgtgcaaagcctcttgaaaagatgctttcaaagagattgggtatcccagttcacgtttctatgtcaactgactacaacaccgttgtggaagctatgaaatcaaagaaagttgatgtaggttttcttccaccagatggttatgttttagctcacaagcaaggcgcagccgatttgcttttgcaagctgaacgttacggtgttaagcaaccaggtggtaaagcaactaaccaattagtaaagagctatcgtgcagaaatccttgttaagaagggttcaaagatcaagaactggaaagacttaaagggtaagtcaatttcagtacaaaacccaacttcatctgctggatacgtattcccagttgctgaacttaagcaaaagggtttggacgtaactaagagttgtaagttagttactgttactggtcacgaccaagctgttttgaacgtattaaacggcgatactgatgcagccttcgtctttgaagatgcacgtaacatcgttaagaaggacaacccaaagatcatgagtcaagttgttccaatttactttactaagccaattcctaacgacactatctcagtaattccaagtatgtctaagtcattccgtaagaagcttgctaaggcattcatctctgtagctaagtcaaaggaaggtaagaaagttatcgaaagcgtatatagccacgaaggttacgcatacgcaaaagatagtgacttcaacgttatccgtaaatacgacaagatcgttgaatcaactaagaaataataaatttaattaagggagtttgacgattaaatggcagataagccaatgattcaattaaaagatgtttccaagatctacgacaatggtactgtaggtttaaagggcatcaacttaactattaataaaggtgaattcgtagtagttgttggtttgtctggtgctggtaagtcaactttgctacgttcaatcaatcatttgcatgatattacttcaggcgatattttgattgacggcaaatcaattacaagtgctaaaggcaagaatttgcgtaaattacgtcgcgatatcggaatgattttccagaactttaacttggttaagcgttctagtgttttgcgcaatgttttggtaggccgcgtagcttactacccaacttggaagactacttttaacttattcagtaaagaagataaacaaaaggcttatgaagctttacaacaagttgatttggccgataaagtttatgcacgtgctgacgagttatcaggtggtcaacaacaacgtgtagctattgcacgtgtgcttatgcaaaatccaaagatcatcttggctgatgaaccaactgcatcacttgatccacagacttcagtgagagtcatgaatgacttgaagatgcttaatgaaaaatacggcatgaccgtagttgctaacttgcacagtatcgaacttgcacaacaatttggtgaaagagtaatcggtatccgtgctggtcaagtagtttacgatggcaagatgaaagatactcctaagtctgtcttcactaatatttacaatggtggtaacggcagcgaggaggatgaataatgcctgaacaagtaaatcaattgcctaagcgtaagttcaaagtaatgaacttggtttggacaatcatcatgattgcaggactatttatttcaatcaatgttactaacacgcacattagtgtcttgtttgaaaactggaaccaatttgctgacatctttattcaaatgtctcatccagattggagctacttgaacgttgtttggcctaagttgattgaaaccatcaagatggctgtcttgggtacggtaattggatctgttgtcgcatttatctactcattattgattgcccgtaacatcgttaagaacaaggctgtgactggcattcttcgtgtgatcatgaacattgtcagaaccattcctgacttgcttcttggtgcgatcttcgtagctatcgtaggtatcggtccagttgctggtatcttggctttagcagtcttcacctttggtgtggttgttaagttgttctacgaagcaatcgaaacaattgatccaggtccaattgaagctttgactgccgtaggtgcaaacaaattgcaaattatccattacgcagttatgccacaaattatcacttacttcatttcatatgttctatatgcatttgaaatcaacgtcagagcatcaacagtccttggttatatcggtgccggtggtattggtttgaacttgcaacaaactttgcaggtcttcaattacgctcaaactggtacgatcatcatcgttattatcgtagttgttgtcttgatcgactacgtttcatctaagtcacgggaggagttaatgaaataatggatactacaatgaaaaaattacccgctaaacccgttgaccgtaagaaacaagttgcacattggctaattgcaattgccactatcgtaattattgtttggtcatgtactggtattaacttcggtggtattaaagccactgctggtcaaattgccggtgcaatcttctcaggtattttccatcctgactggagctatgtttacaatggctcaggtgaagacttggtctcacaattgtggcaaaccatttgtatcgctttcttaggtacattcatttccgcaattatttcattgccatttgccttctgggcagctcacaccaagcacaagcattggtacacttcaagaatcggtaaaattgttttggcaattatccgttcattccctgaaattgttcttgctttgatgttcatcaaggccgtgggtcctggttctgcagccggtgttttggcattaggtttccactcagttggtatgcttgccaagttgttctcggaagctattgaaaacttggaagaagggccaaacgaagctgttattgcagccggtggttctaagttccacgtaatcatgttttcaactatgcctaacttgatgccagctttgatttctaacaccttgtatcgttttgatgtttccattcgttccgcatctatccttggtttggtaggtgccggtggtatcggttatccattgattattgctttgcaatatcgtcaatgggaccgtgttggtatcattttgctagggatcatcattatggtggtgatcatcgactggatttctggttggatcagaaagaagttagtctaattcccaaaatttgaatattaaagaaagcgaagacgaaaagtcaatgtcattaagttaagacattgacattatatcgacagcttttaaagatcgaatcattttgattcggtcttttttctttttaaaataaaaagtgagcagagtttatttgcctttctgctcactttcgtcatattatctggtctttcatagaaagctgtgcctcttatgaaatcccttcactcaaatattttaaagctgatggatagtattatcaataaaatcgctgacaacattcacgatttctctgtatctgatcaagcttttactcgctgtcgtaagctcaattccactgatttgattaagttaattcttaacatgggagctggcagcctgaattcggaaatttttcatgcttttcctgacataaattctagaatgactgcttcggcttttgaacaacaaaaggctaaattaaagcctgaatgctttaaagaaattatgttagaacttagccgggcaaataatgtactgcaattattagataatcaatacttagttgttgcgattgatggctctgattttgatcaaccttttaatcccgaatcagaaaatatttttcgaggtaaagatggtcgaatatactgtcaacttcatgtaaatgctctttatgatgtcttgaataaattatatttacttaaacttcccacactaaataagccagtaatctcttgatcttgcttggctttaggcttctatattatttttgctagttttctttaacaatttttgcatgtatttgggtaaacgattgataaagtcagccgtgaattcagctatttgtgcttcactggcatgaaagacttgctttacgctggccagcattgcatcagtaatcaattgcaaggaatggctaaaagtaatgtccgccagctcatcaatcatgcaatagaacagctcgcctagcgtgcgttcatcttcatcgtcccgcttggcaactgacataagcatgtagcgagtaaaaactatggcaacatgagcggtcaaagcatcgtaagacaggccatgatattccgtacttagttttagataacttttgcaagttttgaaaaaaacctcaatatcccaacgcttgccgtagttgcggataatttcatcttcgctaagcgacatgtcggtacaaatgattgccagccaatccttgcgattggcacggtttctaacgcagacaatccgtgcatctattttagcaccgtctttgtcctggcgtccgactttgactgggattgacagcaggtagcgagaacggccgcatcgctttttacagctgcgataaatctgtttgatgtttttgcgttctccctcaaattcatatttgattttggagctaaccttaaccatggcaatcacatccagcttcctttgcttgagctggacgatttgatgtggatttgagaaccagctgtcaaacagcacgtacttggcttgatgacctgctttcatagcttggtcgattaaattaaccatcacgtctgtgcctttagtccgggcaagcatacgtctttggccagcaatggtgcgctgatcaaaaactttattttcgccaatcatattctgtagcttctgagaagacagcagcactgaattgattggcatgaaagaagctccatcagtccagcccagggtcatcatgcgaaaacctttcttgtaagtcattgatacatggtcaaaaactttggcgactaattctgttttcttgaagccggtcctagagaagtaggaatcatcgacaacaaagcaatcagcccgtttttctgaagtcaaagatcgcaagtggttattaatgatttgcgcagacagaagtgtggtgaagtggagccaattgacgtgaacgttgcgcataaaacggtaatatgagttcttggaaaaattttcttgaaaatgatccattttcagctgcatatataagctgcggtcacgaaagacattgcttaaaacgtaaagaaacaagctgaacaggctaatgcctttttccttgcggaagccacattttctcaacagcttgatcacctgaaacttcttgatgaagctgatgattgagtttgaaaatagttgttcattttgttggtcaggagatggtaaaatagacattggcacaagcctttcatgcaaataaattatgttttggtcaatataattatagcaatgaaaaggacttgtgccttttatatttgtcaaaacacgcagaatcacaatgaaacaagcaattttgcgtgtgggaagtttaagtagtaatatcttttagccacgctaattaaattgctctaatttagtaagttctttctttcgtccaataaacataagatcaccatcttctaaattatattttactaaattacgacttactaaatcatgatttactacatcagataaaagaccaataaaccattaaattcctaagtttttaaaataatcatttagattatctactgtattatcatcatcaggaattaagccattaataattgctaattctttaatcatcacctttttactttctgcatcgattttaaaattaattgagtctgttgtcataactttcctctctatcggcctagtacatgtacttcatattatatttaacaaataacaataatgctaaataccaaacgtttttcaagccaaaattaaatgacccttcgcatacttcattccagcgaagggtcatttcttattaatatttatcatgtatgaaaatctttcttaatcctaatccaagtgattcatcaaatagttattattctatgcctactaataatttcacggcctcttatgtacattaatatcacttgatgattattgaactacattttattttcaatttacgatgcccattggtatcacaaacctttctatatatatgactttctactctcaagtgcccatcggaactcacctctctccttttacttaaacttatttaatatttttatttcttaatttctttacactcataatatagcacatttgttttaaaattgaaagcgattacatagaaacgtaataaaaaatctcacctacttggctagacgagattcatgaaacatatgtgatacttttctttaatcaataagagtacaaattattcaattaattgaaagttattacataaaaagtactagtaattgactgattccatctggcgaaactgtcaaatcttttgtgtaaatagttctttctcgtaaattgattttttaattatttatttaatcaaagtaggattctaaggtgtcctgaacctgaccaaagcctttatgaattcgattgaaataacggtcattgtagctcattgcctgaataccaataaaagcatcaagcgactgttcagttggaaactctgccttaggcttagctttgcgcttgatcacattgttaaatgattcaatcatgttagtcgaataaattgaagctctgatctgcttgggatagttataaaagaccagcagatctggttctatgtctttcaagcttctgataacatggctgtaaaccttgccccatttggtatagaagtcatgcaggacagctgtggcttcttctttgtttgtctgttgatgcacctgtttgaattcgttcatgatcttttcacgatcgtcgacgcgtactttagcgcagatattgcgcatgacatgaaccaaacagcgttgaaaatgagctttaggataagtcctggccaaggctgttttcatgccaacaacaccatcagaaagaaaaagctcaacttgctttaagcctcgggatttcatgttttgaagcatatctgtccagacttcaatgttctcgctaggtgcaatgcagtagtcaatgacctccttgtgcccattaggcttgatgccaatggcaatatagactgcttcacgctcaaatgtttctcggcgcaaaggaaggtatgtcgcatccaaatagacgcagaaaaacttgtcgcttagcttgcgcttgtgataagcctcaatcttggggagcatctgcttggaaatatttgatacctgagctggactgtaatggctgccatacatcttttcaattagatcggctatttccctggtggtcacgcccttggagtaaagcttgataatcatgctttccaagatatccgagtgctgcttgtagtcaggcagcgtgtgctgatgaaattgaccgttgcgatcccgaggcacttgcacttcaattgggccaaattgcgtatcaactttgcggaaataagcaccatttctagagttgccagtattccagccatttctggcatagggatcatagcccagaaaggcagtcaattcagcttctagcaagttattaacagcctgttgtagttctttgcgcaataaatcatttattttgtctggattgaatagagcttgagcaaaatctttggtaaaatcattcatgaaggagttcttctttctgtatgtgttttttttgttcaaaccaatcatacgagaaaggaactcctttttctaatgtttaaagaaataaatttaaggaatcattcatccttacacaaactattttacagtctccatctggcataataaatttctcctaatgtataatacctactttactattattaattgtatactatttgccaaaatttagggtcaaaaaatagccctcaatctaatgaggactatttaaaactagactaacaaattaagccttataacgtgattcaccatttaggtaagtttcacttaaggtcaaatctggattcaaaatcaagaagtcggcatccttatctggtgcgattgtaccgcaattgtccaagatatgggcactcttagcaggaacataactagccatcatcactgccttttctggagtaacgatattccagtcaactacattcttaacggcttgcttcaattgcaagatagatccagccaaattgtcgccatccttaagacgagccatgccatcttttacatagactggcaattcacctaacatgtaatcaccatctggcatcataccggcttccatacaatcagtaatcaaggcaatgtgttcaggaccaaccgcattaatcaaagtcttagccatacatggttgcacatggtggccatcacagattaattcatcggtcacattattaagcgtcattgccgcattagaaattgatggcgtgtggtggcttggatcaggcatcccgttaaaggtatgagtaaacatggttgcacctgcttcaacgcctgcgactgcttcttcaaaactagcgcttgagtggcccaaaacaactactatgccttccttaacggcttcacgaataaattctttggaaccttttctttcaggagccattgaaatcttcttcagcatcccgttagaagcgtccagccacttgttaaattcattaatatcgggatccatcatgtacttaggattttcagctccagcatgttcttccgtgaagaatggtccttcaaagtgaatcccttgaatctttgccccttcttcttgtccttgatggtccgcaaacatcttacaaattctagttaaggtatcgcttgcagcagtgatcgttgttggcatccatgaagtaacccccgcactaagcaagcccttggagatcttattaataccttcccaatcactcttcattacatcctcacgcaatgagccgtgaatgtgggtatcaactaatcctggtgcaacccatttgccagcataatcgacaatcttaccttctggctttttgctttctggatagaaaaagccaaacttgccattatcttgaacttcaagatagccgccgttttctgttctgttttctaagaaaaatttatctgcatgaatgtaataagtcataaatatcttctttctttatatgtctaaatcgtaattgttaatttaattatatctaacaaaattggtaaataccagtttaagcatcgtatttttatcatgctataatgtgcataggaagattgtcgcgtccaatgatcatggatgcatgcgcagtaagacgataacttgcaaacgcgcggtggctctgcataatcaatgtcattaagttaagacattgacaattaatattagacttttaaagcactgatttaacatttaattggttaaattggtgcttttttcgtacaacaaataaggcatagcacagattctgcttttttaagctacgcgatataaataatatacagctgatttgggcttaatatttctcttgtccttgcggcctggtctaattggaatggtataatagctgatctgaataaggatccgttcaaaatcttgcgttaaagaagaagccaaatacatgctctgaataatcaagcatgattgcttgaaattgatggcatattgatacttgcaatgcttttgcggaatataggcctgtgcatcaatttgactgattgcattaaacataatcatatgggcataaatttccatttcaataaatttatcttgtttggaatggaactgtacactgcctaaagaatacttcaatttcttgaaggaggtctcaataccccaacgcagatgataaagctctttaattctttttagcggataattttttcgatcaagattggttagcacaacttcccattcttctttgcctgatttggcatcattaattctaaatttgcaggctcgaaattttattgtgcataactcgccaaaatcccagcttagatcctgggtatttttagagcgatacttaatatattggcgataatgatgctggacatggtgaatattctcactggctttatgcgtgatgtagtaatagttagaagtagttaccaggcaggaaatctcacgatcacattcttgatcaggcaatgtcgttatttctttaactccgccttgtccagccttagttcgtattatgtaatgacagttaggcaggcgattgcagttttcaatcatattgaaactagtgtagccacgatccattgttacaatatatggaccacaattcaaagctttaagcatttgaacagccgctttgcgttcatccatttctgatttaggctgaaaaatacaatcctggtaggtattattcaatagatcatataaggcattaacgtgaatttgacaatagggtttctttttatgagaagaagcttgtacaatgttattcgatttcggattccagatttgattaaagtcagagccatcaatggcaaacaaacggtagtgatgatcaaaaagttgaatattaaatagattttgattaaaaacagtcagaatatgtttaaaacaagcaggagaaagctggcttttgcgttgaacataggcagaagtactaactactttatcgttctttttagttgcatcttcgccaaaagctctaaagagttcactgtttaaattctgaccttgcatgttaattgtagttttaaggactgtcgctgcatctaaagtgcgtttcctggtaaaagcatgaggattattaataaaatcgtgaatatgatccccagtattattgataatttgatcaagacgttctagaatattcttatgaagggctttcataattaacaccatctttctggcaataattttgaaggtttaaaatatataatatataagataggcgaaaaggctggtcttttcgcctttattttatacaaaaaaagagatcgaatccaaatgattcgatctctaaaaaagcacccttaattgtcaatgtcttaacttaatgacattgctgcataatagcagagctttttttgttgatgcatattagtaaatacaattgcttaagaagttttttgatttttagttataatataaggtagcaagtttaaataggaagaataaatatgacacaaaaccaaatagaaagacatcaactaggccaacttatcggtgccaacaaacgtgatcattattatgaacttcactactccaccggcgatattgttcgtctttatattttagctgacgggatcttcagatattttctcgatccagctaagaagtttgacgagaatcactcatcttttgttgacctgtctcaattcaacaatgactattttgaaaaatcacagcctaaggcaaccagcgattccttaatcattaagtctggcaattatcaacttattttccaacaaaagccagccgtaatgagcatctttgacgagacgctgcaccgcaatcgtttggttcagctgagtccacttgaattaggcaatgatcaaactaccgaaattttgaagcaacacaagaatgaattttactttggtggcgggatgcagaacggctacttcagtcataaaggtgaaatcatttcaatcaagcgcgacaagattaccggtaaaggcggcgttttgacccaagtgccattcttctgggctaactccggctttggtgaattgcgcaatactgagagtgctggcaattatgactttggtaaaagcaatccggatgccactatcttaaagcacgacaccaacatgtttgataccttttatctattaggtaattcacccaaaaatattttggcaaagtattacatgttaacgggtaagccgctgatgccacctaaatatgcactaggattaggtcatgttggcaactttttaactaccttatggcagcctggtaaagctaaggaacgtaatgctgttatgtttgaagacggtaattattacaccagaactaacaagccagaagatgctagtggcaagggctctttgaatggcgaagaagaatatcaattctcagcacgggcaatggttgatcgctaccagaagcagcattttaaattaagttggatcgtgcctaactatgatgtgcaagaaatcaacgaagaagccatggctagcttcagtgaatacgccgctatacatgacgttagcgctggtctttggagtcaaaacaacacaccgaaggcttcacctgataccacctttattcaaacggacacaaccgatccaaaagtattgaaaaatgatgcgctaattttacgcaacaatttgaagcgtaagcggccgttgattttctctaatactggtattgctggtagtcaaaatagaacaatgctagcctttggtgacattggcggcaactgggaaaacattccaacacaagttgctggctttttgggggctagcctttcgggccagcctttagttggtagtgccgttgacggtaccgctggcggtggtaatgctcaaattgccattcgtgattttgaatggaaggcatttaccccaatcctgttcaacttagacgatcaaggtaaatttagtaagaccccatttgcttacaatagtaagatgacgcaaattaatcgagcctatttaaaactacgtgagcaattgcagacttacttatataccctaatctaccgcgctcaagtcggtgagccaatcttgcggccattattcttggaatttccacatgaacaagtcaactacaccccacaggtgggccatgaatttatgttagggcctaacttgttgatttcgccaattgttaacggtcgcgaagatggtaatggcaattcaagaaaagacaacctttacttgcctaaccacagaacaatgtgggttgacttatttgatggcaaaaagtacttgggcggacgcgtttataataagcagtcttacccatcctggcatttaccagtatttgtacgaggcggcgctatttttgacctcggcgaacgcaactatgtcctctaccctcaaggcaagagtaaaatggttacttacgatgataacggctataacgactattcaagaaaccatgtagctacacaaatcacgagtgatttagaagcaagcaaattgacgatcaccatcgacccaactcaaggcgatttcaatactttccaaacggaaaacaccaccaacttgaacatcatgtgtgacggttatcctgatggtttgactgttaaaatcaacgacaaggaaatcccgatgcaggagtacggtaccgttgataccttcgcccatgctaaggaaggcttcttctttaacacaaattacagctggatgcctgaatttgatcaataccaagaaaagaaacaaactgctttacaaattaagttagctaaacgcgatattaccgattctaaaattgagattacgatcagaaacttcagatatggcaatgaaactttggttcacgctattacggattcactgttgcgttcaccaaaacaaccaatggttgatccagacaagattagctctcattcattaacagtagtttggccgcaattaaccgaccaagttcaaatcgaagttaacggcattttacatgatggcattgatggtaattcatttactttccatgaactagtgccaaatacccgctacaccctgcgtttgcgttatgtagctggcaacaaagtttcagaatggtcagatccgtttggcgcaattaccaagcccgatccaatgaactatgcaattaatgacattcatgtcacgagcagtctagctagtcctaaggatcatccaattgattacttgactgatttgaagttagcaagtgaatgggaaaccattgatggggtcagcgaagacaagccacttgaattaaacttcacctttaatcatttggaacacttgagtcgaatgggctgggtacctagaaagattgatcaccaaggcgatcctgttgaagttagtgtcgagctttcaagcgatggcgttaactttaagccatacggcgatcacttgacttggaagtctgatagcaagaataaggttgttggcttaagaaatgtcgatgccaaagctattagattaaaggtttacaagtcatctggaccatttgtagctgctaaggaagttattttctttagagataaaaagtaaatgattctaataaaaaagagttctcgtgcgagaactctttttacttatcttattttctacttttcttcatgcgatgattcttaaccaatgacgaaacccacccgctaagaaaaaatagagaaattagcacaaattgtgcgtcaatcgaataagcaaatagcttaaagctaagaaccagcgtaatgattagccacacgcagtacaccgcttcaaaaggcataatcattcggtcaatttttctattcttgacgatagtgtgatagatattgtcattagggttagaagattttttatgcttcacatcattcgccccactcactctttagccattccattgccaagttgaaccagtgcgccgcgtgcggattatcctgccaatcttgccccttagtttccacattgtgacgagccaatgaaaagccgtggtaaccgtggttaaacaaatgagcttctgctgaatccttattcttattcaaagcaccaatatattcaatcgaatttccgatcaaaaccaccggatcatcccatgcctggaaaataaatgtatcgggcgtttcacgtgtaacacctaatgcactatccaaaatctcttcctctacaggcatttttgctttttgatcttctggaatcggaaaaccaatctttttaatatcaatcagcggatagcctaagattgtcttattaggtaaaacatcagtcttatcaaaatcatactttgtctgataatttttatttaaagccatgttattagctacactgaccacatgaccgccagcagaaaagccaactgttaaaatcttatctttatctaactgatactcatcagcgtggtctctgaaatatttcacagtacttagaacatctaaccccgcatcagggtaaattttgtctggatcttgcactaagttatattccatcaccacactgttgaagccttgattgttaaatgctaaggctacgggttcgccttctcttttggataagtgattaaagctaccacctggtactacaatagctagcgggcgcttttgctcaaccaattcaggattaggctctagcgcatatgtatgaacttgatattcacgattattaaagttagtcagcgtcagactttctactctcatgttttggtcctttcttgctcattcctcttgatagcataaatgatgatagtggcactgttaatataaccccaatcaaagaatacatgataattaacgcttcatttacaaaaagtttttcatttaaaacttcaccaatcgtgtaatgcaagcggaaataccataagaataatgataaaaaactaccgaacatcccaaataaaatcgtgttcattgctgtacccaaaacatcattaccaataaccgtaccagaagccatcaactcttcttcaccgatagcagggttatgcttcttgatttctagcaagcccgaactcattgctaccgcggcttccgcgattgcacccaaagttgagaaaatcgccactgtcacggcaatcatcggataactcaagcccggcatctgcgacaagccaaccaataactctcctgcctctggtcctagtcctgcagcttgagccaggtattgacaacccaaaataaagaggctaataatcaaacacactaagaaggaagaataaaatgaattctttgctaccgtatagtcatgagtgcctaaaaagataatcgtaactagctttaaaggaataaaaatcagcgtcaaaattgcaatgttaattccccatgatattagcatcgccactaagatcaatagaatcgtattaattagcacactaaaaaaactacgaattccagtttcaccaccgacgattgtcattaaaatcgctaagacaacgatcaatgcaaataatgtactcatttattctcaccttcttttttaaacaaactcttccaatcgcgttttttcaagaagaacaaactgcatcctgtcgcaaaaataaccgtcagaacaattccgattgccgaaatcacactttgcgttgcccccagcgacagagtaaagccaaaagttgaagctaaagtattattatcacgcaagtacaaaatagtttctggcagcgcaccagcaataaaaattaagaccaagacattaatcaacggtcccataatttcttgccccatcgttcgaccactatgaatcaactgtctcatcgtaatattctttttagtttgaattaattcatacaaactagaaataatatcggtcgcctcatccattactgcacctaaaattccaatcaaagtctgagctaaaaacaagcctcgtggatcttgcgttgcatagtcaccggtctcatatttcatttccgattcacccgttaacttcatgatcacgtagcacaaggcaaaagaaacaaatactcctagcagcgttgccaaccaagtcgccaacatttttttattcaagccctgcacaatgagcaagctaaagaatgaaaagacgatatcagctaagccaaacagcaaaataatgtgggcgccattcaaatgcacatcccaaatgataatcaaataaaagatcagccacgaaattaccattgacacaaccagcgagagtgagtgcttccctactgcagccaccatcaatgctaaagtgattgtcactaccaaaactaacacccaatcacgcttaggattaacgatcgctggatcacccttcttgatattgacaaaaattctctgacctgcacgatacttttgcgtcgtcaattgcgaaggataatacacgtttttagtcgtgtaagtttcgcccttgtgcttacccgataaaacttttaagtgcaaaatttgctggcgagtttcatccgcatttttatacacatcttcacttttttcaatcaaagtatccttgatcttgctatcggtaatcacggcaacgtcgtccttgtggtaaatatcagtggcaaaataggacaagaccgtcaataatgctcctacaattgtcacgataactgctatcgtatagcgctttttccatttaaatttcattacttctacttcctattaattgttatacgcctactgtaaaacaaaagctggccttttgttaggtcagctcttgattcttaatcaatttgtttaaaacttaaagattttttgccaccagtgttccttttggtccgttaattgcatatcttctagtgtacggtgaacatttgaagtagcccgcttcttggcattttcctttgccttagacataatctcgtcatgcatttgttcttgactcttattcatgtcttttttaacttcagcgcgcttttcttcttcactcttcggtttaggttcatccgcactcacaattccagaaatatctggcaaagccgcaaacttatctaaatcatcttgtggcgcagctaattgcttttgtgcttcaattaaatcttgattttgcttttgaatgacattcaattgcttctgcaaagaattaattgcctcattttgattagaaattgtcttttgcaaagtgttaagcaacttaaccacctgctcagtatccattacatcggtactgttataagcgggcttaggagctggttctttagtttcaggttcaggtttcttttcactaacagcatagatttgaagagcggcttcttgcaaagttaagccactatttttagataaacggtgaaaagcctttaagtcatcaatatctttttgatgatacagacgagccttttgcttagtccgagcaaaatagtcgctcttgccggtcaccttctccacgattaaagaatactttcttaacgtggcaacactaattcctaattcttgtgcagctgcttttggtgcagccaattcttcaaaatcatgcttgttagtcgtcattgaaatctacctctatatttttggcgtttagtcatgcttgtgaagcaaagttttcttatgatcaaaacggtccatacctgcttcgattaagcgtgtaatcaattcgctgtaaggaacacctgcttcttcaaacaacttaggatacatactgatattagtaaagcctggtaaagcgttaacttcagtcaagactaccttgccacctggggtgagcatggagtcaattctagccatgccgctacattcagttgctgcataaactttacgtgcattttctctaacagtatcgataatttcttgtggtaaatctgctgggatttgtaacttagaagttgaattatcatcatacttattttcataagtgtagaatgaaccttttgcattggtgatttgaccaacacctgctacaattggcttgtcgttacctaagacagctgtttcaacctcggtgccaggaacagtttcttcaactaagaccttatcgtcatacttgaaggcttcttttaaggctgcagtatattcgtcagcattagttacgtgactaaccccaactgatgagccttggttagatggcttaacgaacatgtcgcggcccaatttttctgctaccttttcatagttaagtttagcattcttcttgtcgtcgtattcaaaacgcttaattgaaatccaatcagcgactggaacaccaactctttgagccaagatcttagtgaattccttatccattgttacagcggctcctaagacgtcatcaccgacgaatggcttatccatcaagcggaacaaaccttgtaaaacaccgtcttcgcctaagttaccgtgaacaattgggaagaaaacatcaatttctggcaagttttctaattcaattaagttagaaatgttgttaaccttatgtgggttcttaacttggtatgaaggatcatctaaaaccttgaagctttcttcttcattagcaaagtagccttcattagtgatccaaattgggtgcacatcaaacttatctttgtcgattgctttatagatgttgcggcctgaaacaattgatacttcatattctgatgaattaccaccaaaaatcaaaccaacttgtaattttttagtcattattttatacctcttttaaatgttccaatctttaattatacgcaaagaataccagaaaagcgcaaaatagtggaatatttttcactaaagccttttcattggttatagtttataatgaaaggtatactgacaaccatagaagggagtctaaaatgcttctacggaaattttctattgccgctgccgcaactttatttatccccctcgccggacaagttacacaagcagcgacattcacaacacaagaagttaacgaagttcataattttcaaaaggaatatgcgaaccttgataaaactagttatagtgccgcaaatatttatgctaaaaagccaaatctaagcaaaaaatttaaggtaggtcgcttagatccaaaatacattaaaacgcaaacagattatatcaattactatcgatcattgttcagtctgcccgctatctcgactactgatacacttaataaaaacgcgcagattacggctgctgtaatggccgcaattaatgctaacccattcattaaccaacatggtttacctagtgaaactaagccaagcaatatctccaaatttgtttggaagctagctaaagacacttctgaaacttcaaatttaaactttaatgtttcacagcaaaccgctggggatgtgatcactgacttaattactgaccattataatttaactggttcagataccggtcaccgagcttggctactttcaagtcgtttaaccactacaggcattggggcagcttatggtacaaatggctaccgctattccgttcaaaaagtactaaacattaatgatacttttcgtcctgctagtcagccggtagttgcttatcctagcatgcgtcttttccctattgaattgcttcaagggaaaaatatcatgtggtcgctctatttatcagatagaaccattaaaaataagccaacaattactatcactgatttagatactaaagttgttactactgcagctcatgttaagaattacagctcctgtggctacggcaattttagaacgatcctaacttattcacccgcaaatactaacctagttgcaggacatgaatatgaagttgacgttaaaggcgtgcagaagtacagattcaagctatttaagcaagatagtactaatgacactacaaattatcaagttcagcaggatacaaccaacacgccgaccaatcaagcaaccactaatttaaatagcgaaacagatgtgcaatcaccaattttacttcaaaacaagattttacgtgctgtcatcattcccaaagccactgctttgcctaataatcaaaacaccttttttaatgcattaattcaaaaaggatggcatcaaaattttttcgtaagacagtacgtattatcaaaccccatcattacagatgagtaaattaaaaggcccaagcaatgcttgagcctttttgattataaaactttagataagaaatcttttgcacgttcactagtagggtgttcaaacacttcctgtggcgtgcctttttcttgtaaatagccatcagccataaaccagacctcatcggctacttctctagcaaatcccatttcgtgagttacaatcaccattgtcattcccgaattagctaaatcttgcattgttttcaaaacttcgccaaccatttcaggatcaagagcacttgtaggctcatcaaatagcattacttccggatccattgctagggctctagcgatcgccacccgctgctgttgaccacctgataaactagctggaaattgttttgcacgatcggccaagcccaccttttcaagtaagactagtccagtcttctcagcttgagcttcactaacacccttgactttcatcggtgccaacttaatattttcaattacattcatattaggaaaaaggttaaagttctgaaaaaccattcccatcttttcccgcaattgatcaagttccttaccatcctttagactagccaagtctgttccatcaaaaacaattttaccagtcgtaggacgctctaatacattcaggcaacgcaagaaagtactcttacctgacccagatggcccgataatacagataacctggcccttatctacttccgcagaaatatctttcagaacctcatttttgccgaaagttttcttcaaatgttggatatcgatcattttagtcattgtgtttcatccgtctttcgaaataattaagcaatctagttaaagtaaatgtcatgataaagtaaataatcatggcaatgaataaaggtaaaacaccacggtaagtcgaagtctgaatcaattccgtttggtacattaattcagttaccccaataactgaaaccaatgaactgtccttcagcagggtaataaattcgtttcctagtgccggccaaatatttttcaaagcttgaggaataattacatagcggtaagccttagcttgagaaagacctaatgatctagccgcctcagtctgtcctttagctactgaagcaataccagaacgaatgtcttctgcaacgtaagcaccagagttcaacccaattgcgataatccccgctacaacagctgacaggttagaaattaatgctccaacaccaaagtaaacaaataaaatttgcaccatttgtggcgtaccacgaatgaattcgatatagcaaactgcaatccagtgcagcaatttattcttggacaaacgcattaaggctaagagcatccctaagatgatcccgattaacactgagaaaatcgtgatcacgatggtatagccaactcccttaataaagtaaggaatatatttagtcatcgtgttcgtcttctgcgctgtcttcatatacttagctgcttcaggcaagtatttcttattaatcaaatctttttgttcaacgcgattaatagtcttgttcacagcagctactaagtcattttgtcctttagcaattgctactgcgttaccagcttgttgttcacgcaagtcacttctcacagccatcaagctattgtcgttttgttggtaggccttagcagtcatttcttccatgacaatgccagagatcttattagattttaatgccagaactaagttgttgattttgcctaagcctttaaccttagactgtttcatttgcttttgaatcaaagaatactgaatactaccagtttgcgcaccgacagttttaccagcaaaatctttaatttttttgtatttggcctgatcgcgtttgttaattaagaaatattcgccacttggcttgtaataaatcttagaaaaatcaacgctcttctttctctcgggattaggtgtcatagccgaaataaccatgtctaccttgcctgtctctagcgctaccaaaagtgaatcaaagctcatgtttttaataactagctttgcatgtaaatccttggcaatatcttttgccaactcgatatcaacccccacatatttggtattgccattttcactggtagtaaactccagtggcggataatccgctgaggtgcccactactaattctttcgactgcttaatttttttcatcactgagccagtctcaacctccttattggctgcattaacaggctgattaaacaaaaaaagagtcgaaagcatagtaatgaaagcaagaaaagtctttataattttagcttttttcataaactcgcccaattcttttaaaatataaacatatgaaatttgttaattattttttaattataaagaaagatgattctttgtgcaaacaaaaaacgtaatcattctacagattacgttttctcattcttatttagcagctgtaatttgccatggtatcgcacaaatgatgtaaataattaccccagcaattacatattccaaaaagacgctactgccaatctcaagcaaaaagccaaattcgatattatcgacattaaagattactggcacaagtgctaacaagcctgaaatcaaaattagccaaaaacctgcccacatgccagcagccatcgtatcatgaatcaccattcgaattgtagcccgcgacttcatatcgttgagtagcgaaaccattgtaataatggtaacaataattattatcaaattaacgataaacaataaaccagcaatatttgctcctaaagtgatcacacttaaattgaaggctttaataatcgcgtaaggtgcattagttccctgctttttcagtttacggttaacttcctgtgccccacttgacgagcctttagcaattccttgatcgatatcgcttaaaatctgattagccagtggcaaactagtaaccttaaaccaatgaatacccaaagaataatcaataatatggtcggcaattggttgagtttgcgtatccgatagtaagtttgaattatcttcactatctgcattaatcaaatcagctaggctatcataatttttattcacttggcgaacaactactgccctattatagctagtcctaatctgttttttcataaagattggatttaaaaaagtagctgtaatcaatgataatgcagcaatcaaaaagatgacgaaagccaacaaacgtttatattggttattttgctcataacccattcgtcgcaaatcagctcttttgccttcaaccatggcgactcccctttagctgaaaatttccttgccttcatcgaacattgtatcaattgctcggtgaacaacttccatatcagcagtttcaataatttcatgtccttcttttaaggcttgatcaatttcttcagaagaacaatgcaagaaactgaacatcaatgcacttgttgcatagttagcaagagcttcggccgttaaatggtgttttttgcgatcatgatatagacggccaataccactagttacaaacgcaattcctgtctcaagttcgctttcgtcaacgttaatgtcatcaaataaatgattttccttaatccattcattaagcatgattccccaattatctagggtagcattgctaacaaaagcttcagaaataatacggtccaagccctcatcgtgcatccccaagatagcaatcgtataaataaatgccttagttctagcataaggaagattgctattagccatgtcataattattaacttgttgacctaaagtattaaaaagattgcggataatgtcgttagttaacttagccttatgaggatagtatgactgcagtaaggattttgaaatgcctgatttttctgcaatcatttgcaaagaaacattatccattccattttctctgatcagatggaaagtattacctagaataactctccgtctcttcatgtttttccgtcgtgccatagtctattcctctaactttctctttttctttctatacaacacatatcaattatatcaatcattactatttagacatagttttataacttatctacccgattttttgaataaaaaataatcctcatagtgaggatcattttttattcaaattatcaataagaattttactttaaacggttttgttcgtcaaagatttggtggattgaacgatcattgtatacataatcgataccacgagcaagcaattggtctacggaaattctgaccattctgtctgggtagcgcttgtgcttaatggtatcagtaactacgatttgctcaattggtaattcattaagtactccagtagcattcttagaaagaagtgcgtgggttgcggcaacgtaaactttcttagcaccagctgccaaaactgacttagttgatgaagaaatacgtgaacctgtatcaatcaaatcatcaatgatgatacactttttgtccttaacatcaccaatcatgtcgtggacctcagtatcatagcgagcacctctttgatcaacaattgcaatcggtgcattgaagtattgaccaaagttacgagcaagcttagcgcctgagtgatcaggtgagactacaacgatatcatcatcttccttggtagcaattccgttatctaagaagtattgaccaagaagtggaatggcatgtaagtgatcaacagggatattgtagaaaccttgaatttgtgaggcatgtagatcaacagtaattaaacgatccatgccagtcaattgaagcaagttagccactaacttagcggtaattggttcacgtgaacgagtcttggtatctgaacgtgaatatgccaagtatggtacaaccacgttaattatatgagctgatgcacgttgaagtgcgtccaaaacaatttcaagttccataaagttttcgttaactggatcttggatagattgaattacgaaaacatcacaacctctgacagattcaccaatgttaacttggatttcaccatcgctaaagtggtgaaccgcagtttcgatcaatggttggtgtaaaattgccgcaattttttcatttaatgcagggttaccacctaagccaataactttcattgggtgcaataattgatgaagttcttccttgttcattatttacctcttctgaataaaaatcgtatacaccaccattatatacaaaaaggcacctctattgaagagatgtccatgtttgcaatcaattttattgacgctttcttttaaaataaaacaaaataatgccaataatcaatgctaattctggcacgactaaattacttaagctcagatttaaaccgtgcatgaaatatatcaaacaaactgcagcgatcatcaatgaaattgcaatatcctgtagatttactgttcttggcactttggtaattaaactaacagctagcataataattctaacaataattaaaatgcctgcaatgaacattaaaattgatgacgtgctgaaatcttgataaacaggaattgcacctaaaagtaaaacaatcccaaaagtgataaaaactataccggcattgaacagatttaatgtttctaccctattttgaaaaccaaatataacagcaactgcagcaactatcacgttaaccagcaatactatccacattacctacgcgtggtgctagttaaatcgttttagttaataaaaaagtccaatcggattagactcaagttgtaagtaaattaaatagaaaagagtctgatctaattgaactacctcaagcttaatcgtttctctcaccatttacaagttagttttagtcgtttaaatgtaatttgtcgttcactatataatctttatgcgcctgataagcttacgcatcgaaaaaacattgatcaaacaaagctttccgacagctccatcttagcgatgctcatttggcaaactgaaattggaattgaatcccaaagaagattctgtaaattttttgttggcttatctcattctcgctttaatcgtcgagccaagatgcttttgcctttaattcgctgcatccgtcaagcttggaatcaagaggtaaaggttgctggagaatttttaattattgacagttttcctgttccagtttgtcagcctgttcgtaattatcgtgttaagatcttccgtgacatagccgatattggctataaagcaaccaagaaagtctattattatggtttcaaggtgcacgcgctagtaagcgatgatggctatttgcttgactacgcagtcactaaagcatcagtgcatgatgccaaagaaacgacagaattgatgattaatgctcatccaattaaccattatcttttaggcgatgaaggctacttaggaaaagacttagctgccgagttaaaaggtatgggctatgtcctttggacaccatatcgaaaaaacatgaaaggtgctaaaaaacataataatcatcaactgatggcaattagaagaacaattgaaagcgacttttctttgctcagttactataacgctgaaaataaccgagcaaggagcttagctggctttcagcagcggctagaaatagccattttagcttataatatggcatattgcctagaacgatttaactagcaccacgcgtattacctacaaaatcctttaatcaaatccagcagttttaaactgcgcactgcataactgtcatgcgtctgccgtggcataatcaccaaccgcgcattgggcataaattggctataccaacgtacatgctcaaccttaacccagtctttttcacctactacacaaagagttggcgtagtaatcttcttcaagtcatctactgaaataaaggactcagtcaactctacgcggctgtcacgatcaagtctcaaaaagcgatgaaagccttccgttaagtagtgatatggtctaatgcctgcaccattaacgaaaacgccagctacaatcatcttcttaaagatcgttggatgttttctagctagcatcattgccaccagaccacctgcatcaaaaccgaagcaatagcagccttcaatgccaacctgtttaacaaaggcatagacgtcttctacttcggtcttgtagtgttccgcaatgtcgccttcactaaggccgtggccccgcatatcaagcacgtaaacggtgtaataaagagaaagcggagccacaattttatcaaacataccaccatctaagtgatgtccatgtagtaaaagcaaaggctcacctttacctaacttatgataataaatttcgactccattaactttttctttcatgttttcccctattcactatcacgcaaggcctgctgtcgctctaacttcttacgcatcttttcttcctcgcggtctttcatcattgtactgataattttgctccaaacccggtaatttccccggaaattatccgcaacttttttaatattaggctggtgaataatactgccctttctctgccagtagtggtaataaggtttttgcgtgtagtagacgcctttagccacagaaatatatttaacgttaaaaatctgatcttccagtagtgaaatatccctatcaaacttcaaatgatatttcttaataatggcagttttataggccttgttccagctatatcctttcattggtgagctaaagacattagtcaacttcaaataagtttcaccgcgcgttaaatagccaccttctggtcgaccaacaacgcgttgctttttgtcaggataatccatccaatagccacatgatactaagctgacatctggatgactttcaaaagcatgaataaaaaaggatgtgtagcctggatccacccaatcatcaccatcatgaaaggtgacatatggtgtgtcaagatactgcatcccaacattacgtgcatcggatgggccgccatttttctttttaattattttaaaatatggaaaacgattggcatagctttcggctaccttaaccgaattatctgttgagccatcatctactacaagcaatttgaagctcttgtcaacttgattaagcagagcatcaaaagcacgtggcaagtattgcgccgtgttataaacaggcatgatgatggttaacttaggcacttgtaacatattgtccccctttgttgctctttattataccatcttcaataataaggtcgaaattaagaaagttttacgtgttgtttaattcacttttgaaaaatatttagtataatgttccgtattacaagaataaatattcgatcaaaaaggaagaaaagaagaaaaaatgaagaaatttatcacactactcacagcaatgttattaagcgtggtcgcgatgatctcatttactaagccagtattagcagatgatgatacacctgtagttaccttaggtacatcattaactgatgcgcaaaagcaaggcacattaaagaccttaaccgccccactaaacggtggtaattatcaaacaattactgttaccggctcagatctggttaaatatttaaatccctctggtgataatttcaccacttcatccggtgtttggtccagtgcgatgatccaaaagaccagctcaggcagcggaatcaacgttaaaattttagactacgatggtaaaaataatatcacgactattactgccaaccagtacaaaaacgcagccctgaccgccggcatcagcgatgccaacatttatgttactagcgctattccaattgatggttcaggggcattagctggagtttatgctgcctatgctaaaaatggcaatgcattaaatcaaaagcaagttaatgccgctcaagatgaaatgaataccttgtctgggattacccaagataataaaaacaaaaaaggttattcagatgctcaattgaacaatgcggttgccggtgccaagaatgagatggctaaacaagggcaaaacattaccgacagtcaaattcgcgacattgtcaacaatcaaattaatattaaccacttaggtgacaccatcaacaacaatcaaaaaaatcaaattgtcaatcttctaattgaaattcgtgattcaggggcattgaaggacggtaacttcaagcaacaggcttcgaaattatccagtcagattcaaaatggagctaaaaatatcttcaataaatttaatacccaagaaaaccgcaactggttacaaaatttgtgggatcaaatcgttaagttctttagtggtttgttcggcggcgttattttaaattaaaaaaggctacagtgtagccttttttcttacattttttgatccatataacggttcaattcatgatcgacaaattcattaccgcgattattagcgtgacctttcgtccattcaaacgtactatcaggaaattcctttaataaccgatctaattcctgccattccgccacattagccaatggtccagaagaacgtctccaaccacgttttttccagccttgtagccaatgcttattaatcgcattcaacacatactgcgaatcaagaacaaataatagatgtttatcgttaaaaccaagctcaagcagcttttttagtgcattaatcaatgctgtctgctccatcttattgttagtagcaccatattcaccaccggagccatgaactttctggtcatcccattcaattaaataagcccaggctgctttatcggtctttttaacgtgaccgcccttataaacaccagtattgcgcgtgccaccatcagtataagtcaccgcaaagaagtcagcaggattgctattaacatggttatactgcttcgccttttttcgcggtgctttttttatttcttgactcttttgttgcaccctttttacggcgttttgtaaattatcttcacctttttgcaggacatcgctctgagtttgggcattccaatctaagtaatctgtagcatcggtaatttgttcaaatgacttatattctgcaccagagaagccatcaacttgttctttggctgcatcccaagtccgatatattcccggagtacgtccttttttgactgcataaaacttcatttctacctctaaaattccaaaatctttacccaatggtaaaatatacttattgcataacttttattataggaaaaaagaaagagaaggtggtaaaaatgtttttcaacacaaaaaaatatgctgaagaagttgaaaaagatcataaacatgacctccaagaagaacctagcatgtttaacatgatttctttggggctgatggccaccttcgctcccacgcgaattttcctcaaattacacaagcgccatattgaaaataaggcaaacattgaaaaaagcgatctaaaacaagtacccattatttatttccatggctttcgcggcggtgattataccactcgcgtgatggtgaaacacgctacttatgacaagggcaatcccaagtttttaaaggtaaccgttgatttattaggaaatttcaaattagaaggaacttggactagtgacaagcatcctatcgtgcaggttgcttttcgccagcgaatagtcggtatctatggcatcgactattatctcaacttcgtcctgccctttttagctaaaagatatggttttaaaaactatattgcagtcgctcattcattagcctgtccatgtattattcgcactgaaatgaagcactaccgcagcaaaacgttcccacatttaaaaaaatgtgcctttatcgctggtccttttgacggggtcacttacttgggcgatatcccaaacgtcaactatttgaccgaaagtggtcggcctagtgtcatgaacccgcactacctttatttgttttttaatcggcgcaaattcaatcctgatatctcggtcttgaatatttatggcaacgttttagataacacaaatactgataaattcatctctgttgtttccgcaaaaagcattcgctatatcgttgccccaaaagcacatttttatcaagaagtagaagtacgcggtaaagatgacgccgaacatagttggatgcatgacaatccgtttgtaatcgatattattgacaagtttcttaaattaaaaaagtagtttaattttggaggagtttatgatctggtggcatgactttgttagaatcattatcattaccaacacaatcttagccttctacgttgtcttccaccgtagaagatccgtttcaaccacttgggcttggttaatcatcctgttagtattaccagtagtcgggattactctttatgccttctttggtcggggtatttcccaggaaaatatttttgccatcaataagcaaaaacacattggcttgagaaatgttcaaaaatcgattgctaaagcacctaaaaatactagtccttctgacacttcaaaggctggtaatatagcaattaacttttttaaccatcaacaagaagctcccctaactaaaaataatcaggtcaagctctataccgaaggtgaaaccttctttcatgacatgcttaaggacatggtacgagctaaggaaataatcaatgttgagttctacactttttatagcgacaatatcggcaatcgtgttttgcaactattgattaaaaaagcaaaacaaggagttaaagtacgcgtaatttatgatgcctggggttcaatgggagctactaaagcatggttcgatcaattgcgggcagctggcggggaagttttgccttttgtcacttcacgcaacatgatcacccgttaccgcattaactaccacttgcaccgcaagattgttgtcatcgacgggcgaatttcttggactggcggttttaatattggtgatcaatatttaggcaaaaaaaagaagtttggtcattggcgtgatagtcaggtaagaattgttggttctgcctctctgcttttgcaagagcgtttcgtcatggactggaatgcctctatcactaataatcaacagctcatacgtttcaattccactctatttcctgatcttgatgaaaaaaacatccacgaaggcgacgttgcaacgcaaatcatttcagacgggcctgatcgttatgcaccatatatgcgtaacggtatgatgcggctaatgcttttggcacgcaaacggttatggattcaaacaccatacttaatccctgatgatgccgtttttgctacgtggcaaacaattgcctcatcgggtgttgacgtacgaattatgatcccatgtaagccagaccacccctttatttatcgcgccacacagtggtatgccaacgaattaactcgcttgggtgtcaaaatttatatctacgaagatggctttttacatgccaaaacgacgattgtcgacgaccatttttcttcagttggttcaatgaatcaagatttccgttcttacaacttaaactttgaagataatgccgttttttatgataaaaagttcaaccagaaaatggtggcagcttttgaagaagatatgaaacactcgcatttactaactaaggaagaaataaaaaagcaaagtcgcgcattgcggactttgcaggcattctcgcgaatgctttctccaattttgtaattacatcattgattgaacttcgacaggaatttctcgaccagcatattcttgtaattgcttaattacgctattaacttcattattaaagcgcatcatataagccttaccatcgctagttcgaaaaatcgccatcactaatggcttctcttggttggggatctggattaaagtagcgctggctaaatcatcatacttaactgtacgcttgaagtagcctgaaacgaccatccgctttttactaaatcctgaaaaaccatcgacaatactaattaagataaaaagagccaagaagacgctcaggcctggatcacctttttcaatgtaattccatgtaaagcccagccagataaaaattagcgcccaaacaactgaggagatacgatagcgaccacgaaaatcaactttagcttgccaataccaactataacaagcataaactactaataaaatatcaattgctacataaaaatacgtcatatatttcataaaaatcccctcaatttagttattttaatcattatactgaaacttgaaagctaagattaacgctccttccccgcgcctcttggctttttcttatcaaaaataaaaacgcaggctctctctgcgttatactttaagtgtcgacctaaaaagtaaaggagatcctgcgcaatgaacagtatagaacaaatcgacacagaaaatgatactaaatccttaatttcttcatttattaatctaattggtctagctaagttaactaaacaagtcaattttaagcgtaaatccaccgtttcattaaccatgattatctcttggctgatgtcagtacattttgctcggctttctttattcagagctaaggatgacaaacgtttttccgttagaactgctcgcaatgtacttaacgatggaagaatcaactggcaaaaactattatgcttgattgcagcccggctcattggctgcttaaaaccatttatcgataaaagacgccgacttgcttttatcgttgacgatacgctgatggctcggtctttttctaaaaagaccgaattgctagctaaagtctatgaccatgacaagcatgagtatttgaacggatatcgtggtttaactttaggctggagcgatggcaataccttcttgccggttaactttgccttgatgtcaaccaaaaccaagaaaaatatgattggagctgctcccattactgctgatgaacgttcaatttctggtaaaaggagaaatcaagctcagagaaagatgaatgatgtaactgtagagttgattagacaagccttacgattaggagtagaagctaaatacgtcttattcgattcttggttttcttctccaagaatgttttggattttaaagaagatcggtttagatggacttggcatgatcaagaagagttcaaagatttattacatttatcgccatcgccgctatagcgttaaagacttgtatgatcgtttggctgcttcaaacatccgtaaaaagaaacattatctttattcaagcatagttgaggctcaatatcatggacatagctttttattaaagctcgtctttgtctccaaccgtggaaacaagaacaagtatttggttttagctactactcagacaaagcttagccctgaagaaatcatccaactttatggtcgtagatggcaaattgaaacatattttaagacgtctaagcaatatcttgctttagataaatctcaagttcaaagctatgatggccaatgtggctatatcgcagttacagcaataacttatgatctattgacctggcaggaaagacaaaatacagatgataagacaatcggagatttattctatctaatgaacgaatccttacctgatattagattcgtagatgcattggtctacttaatttcagaattaaaagagcttaaacagaatagttttgaaaagatagatgaagtaatcaatgactttattaaccaactgccacgattcatacaaattgcactgaaacagatcatataaaaactaattacgtctaagaaagctcaatagtgacaggacttgagcttgattttggtgctttcaattttcagtcattataacaaaacaatgatttataattaaagtagtgactttcacggagggtgacattatatgatggatttagcagaattacaaacagatattaataatgcccaacatattgtattcttaactggagctggtgtttctacccactcaggtatccctgactaccgctctaaaaacggaatctatgatggcgtgcaagaaagtcccgaaactatactgagcgatagtacgctattcaatcgacctgaatttttccatgaatttgtcatgaacaatatgtactttcctactgctaaaccaaacttaatccatgaaaaaatcgcccatttttgtaatgaaaaaggtaatttaattacccaaaatatcgatactttggatactaaggctggcaatcaacatgtaacagaatttcatggcaatttatataatatttattgtactaaatgtcatcaacctgtttcttatgaagaatatgctaaaagctatttacacaaagattgtggcggaattattcgccccggtattgtgttatacggcgaaggcattgatccgaaagtattaaaccagtccgttgaaataatgcaaaaatcagacttgatcatcatttgtgggacgagttttgtagtttatccttttgcccagctcttggcttatcgcaaagaagacgccaaaatttactctatcaacaagacagaaattcctacccctggtgtcacgcaaataattggggatgcattaacagcattccagaatttgaattaactttcctagtttgttattcttagactaattatttttaataaagatgttacacatgacagagtttttttactatgattacgttacaattgagccatggacctactttttaacagcttcagaagccggcctaacttacgtcggacttaaaggagatgaaactgtttcacctatttttagcttctaccctcaccgcatgttggtgcgggaccctaaaaagatggcacctcatatcaaacaattaaaggaatattttgctggtatcagaaagaattttgatgttcctattgatatttcggaattcggcactgaatttcaacgaaaggtattagccgttgtccagcatattccttatggtgtgacgttaacttatggtgacgtcgccaattcactagccgaagccacatcttctcgctcagttgcacacgccgtagcattaaaccctgttttgatttttattcctgaccaaagagttattttatccaacaataaagttgggacttatcgtctgggacaaaaagaaaaaatcagattaattaaattagaaaagaagcaactacatgtcaattcttaaactatatgcacccttttttgacggcaataactggttacatgtcctaaccagtggcaaagactggatgatcattctgactttaatcttgatggaatgcttgttatcagtcgacaatgctgtcgttttggccgcacagacacaggtgctacctaataaagctgaacaacgcaagtccttggtttatggcttgtggggtgcttatttattccgctttattgttatcggaatcgggacttatctgatcaacttttgggagattaaattagctggtagtatttatcttttttacctagcctttaaattcttctatgatcaacgccaccctaaacaagctgccgaacatgagaaagaaaaagaagagcgcgaagcagctcgccacaaaggcaaaaagaaaaagagacatgtgctatctcttttctggcgtacggttatttcaattgaatcaatggatatcgtcttttcaattgattctgttttagctgctttagccgtgtctgataaccccgttgttgttttaatcggtggcatgatcggcattctctgtatgagaggagttgccgaaattatcattaaattaatggatattattccagaattgcagccaatggcttacttattgataggaatcatcgctttaaaattgctactagctctgccaccattgagatttgagttgccaaacaccgtttttgcaattattgtctttgcgatcttaattttgacaattctcttccacttttggaaagttaaaaaacacggtcacaaacatatttaactgtttagcgtatttaatacatattctttgagtacaactgcttggttgtgctctttatttttggcaccaaataagaaaagaacatcttctttagccaaatgcttctttacatcttgcaaaaattccgctgtataatcattatgattaagttcttcaatatacttttgcttaaacttagggaatttttcatcttcatgattaaaccactgacgcaattccttactagggccaatttgtttatcccattcagctaaatcggccttaactttgctcattccccgtggccataaacggtcaactaaaatccgataaccagcaggttgctcatggtcataaattcgaactaatttaatttctgtcattattttttatctcttttctagaaaggtcaaaaatgaattattcaacttatttttctactaacactaccgattatattgcaaaagacctaattgggcgaatgcttacttttgataatggtcaagaaaaattaggcggctatatcgtggaagcagaagcatatatgggtaaaaaggatcgcgctgcacattcttatggcggtcgtcgtagcccagcgaatgaaggactttacggcaaaggcggaacgatctatatctacgcgcaacgtcaatattttttctttgatgttgccactagggttcagaatgaaccacagggtgttttaatccgtgcaatcgatcccactttaggaattgagaccatgatcaagaaccgtcatggtaaagatggcgttcttttgactaatggtcccgcaaaaatgatgcaagcttttggtattcatgataaaaattggaatttgcactttttatcagactcccctttcgccattgatcttgatgatcgtcataaaaaaattccccaggaaataattgctgcagcgcgtgttggtatcaatcaatctgatcccgtttgggctaacaaaaaattacgtttttatgtagcaggaaatccttatgtttctgatatgaaaaagagaaattatgaaactaataatggttgggcttgacaaatttaactttttcttctagtattcttcattagttaaatatttttccaatgcaatagaggttgcgacaatcacaagttaagtttgagttcgcgaaaacaatgatagttaacttagggttgccgccgaaatagatttaatattcgcgtgttaatctgttgggctatagaagaatattctatagactgtcctggttagttcccagggagcgctataagatttggtttaaacactgatgattatgaccctcgcaattctttggaagagcgaggtttttgtttactctttattgtgttggctttatgttaaaactatttttggaggttttataattgaagtcaagatttagatggatggctgtaataatgtctgtcctactcagtttatttatcggtttttctcttagtagcaatcagactcaagctgctaagaaagattctggcacgttaaaaataggtatggaggcaaactatcctccatacaactggactcagccaaccaaagctaatggagctgttccaattgatgattctaactcctatgctaatggttatgatgttcaaattgccaagatcatcggtaaacgactacacaaaaaagtaatcgtagaaaagactcaatgggatggtctattgccagctttgacatcaggcaaaatcgacttgattattgctggtatgtctcctactgccgaaagacgcaaggcaattaatttctcagaaccttatcgtaaaagtactttcgtcgtaattactaataaggcaagtaaatattctaatgctaagaagttgactgatttcaaaggtgccaagttaaccgcacaacaaggaactttgcactacgatttaatcaagcaattaaaaggtgctaaaagagaaccagctatgcgtgacttttcagccatgcgtcaaagtttagcttctggcaccattgatggttatgttgctgaagatattgaatttgaaagttaccacaacgttaaccctaacattattgcagttaacttaaacaaaatggctggcttcaaagttgaccatgacgattccgtaactagtatcggggttaaaaagggtaataccaagcttttaaatgaagttaacgctactttaagaactatttctaataaaaagcgtgatcaattaatgtcacaagccatcaaggaacaacctaaggctggtaacgaaactaagaaagaaaactggctagttactacttggaagcaatatggtggcatgattatgtcaggtattggcatgaccttgcttttagctttagttggtaccattgttggtttctttatcggcttgcttgtaggaattattcgtaccattcctactccaactactcgcggcaagcgttggactttgaacgtagttaagtggttattatctgtttatgtagaaatcttccgtggtacaccaatgatggttcaagcagccgtaatctactatggtattgcccaattctggcacttgaatttaaatagaactgtagctgctttgattattgtgtcaattaacactggtgcttacttagctgaggttatccgtggtggtattatttcaactccagaaggtcaattcgaagcagctagtgcacttggtatgacccacaaccaaagaatgtggcatatcatcttgcctcaagctattagaaactgtttaccatcaatcaccaacgaatttatcgttaacatcaaggatacttcagtattgagtatcatctcagtttctgaattgttcttcgttggtactactattgccagtcaatcattcaagttcttcccaacttacttaatgatttcagcaatttacttgatcttaacctttactattactagaatcttcaactttatcgaaaagagacttgaaggtaataagaattacaacttgatggctaaccaagtccaagttggtactccaaaagatgcggaggcaaataattaatgactgaatcaaacgaagtaattttaagcttaaagcacatgcaaaagtcttatggaaatcaccaagtattaaaggatatttcctttgacatcaataaaggcgaaatcgtaacgatcattggtccttctggtggtggtaaatcaactactttgcgttgtatcaacctgcttgaagaaccaactggcggcgagatcgattttcacggtaaaaatatcttgcatcccggctataaccgcaatacctttagatcaaaggttggtatggttttccaacagtttgatctattcgaaaataaaaatgttttagaaaactgcatggtcggtcaagaattagtcttgaaacgttctaaagatgaagcacgcaagattgccatgaaaaacctagaaaaggttggcatggatcctttcattaaggctaagccacaacaattatctggtggtcagcagcagcgtgtagctattgcccgtgcgatttcaatgaatccagaagttttattgttcgacgaaccaactagtgcccttgacccagaaatggttggcgaagtactagacgttatgcaaaagcttgctacaaccggtttgacgatggtgatcgttacccacgaaatgggctttgccaagagtatttctgatcgcgtattgttcatcagtgacggtatcattactgaacaaggttcaccggaagaattattcgaccatcctaagaatgaaaagacgcaaaagttcttgagcaactttagaaataatgaattctaatatcaaaaaagccgcgaagtttaattgcttcacggcttttttagcgtataatttataacaaattaatttttggaggaagtaaaatgaatgatagagtatattattttatcaagccttatgacgaaagtctgccactgccgcctgcagaaagttttgcgcaaattttgaacgaggcttatttgcatcccttcaactggaaagcaagaactacgcgtaaatctttctggtggagcactttgattaatcttgttatcggcatcttatgcatccttcttggcttctatgcttttaaccaaaacatcaaccccggcattagaatagtcgatggtattgttgcggctgttgtttatctgtggctatttttagctgcattaggacaaacgatccgacgtttgcacgatgttggctacagcggctattggtactgggctgccttcactggttatggcgcaatgtttttattttatcttgaattgcagccatctgttcaacgccaagttaagtggggcaaatacttgttcagcgatcaagattatcctaagggtggcgcaaaaagtaatgttcctgtaccaactattggtcaaatcttgaaggaacacttctttgactgctttaagtgggatgctagatctactagaacctcattctgggtaggtactgcaattagccaagttatcatgacaatcggcgtatttgcttgttacctacttgctttcatgcttttagctcctttcagcgttactgaatttgattctggcgatgccaaggtaatcggtgtaatcttcatcatttttattattttctttattgcagcagctatttgggcctttttagcacaattaggtcacactgttcgtcgtctgcacgacgcaggctttaacggtggttggtggtggctgggcgtaattccttacgttggtcaactgttgctagcattcttgctcttccaccctactgttcaaaatgaagttaaatgggacaaatatttatttgatccagaagatcgaattagatagataaaaattaaaaagatcattcctatatggggcaatgtcattaagttaagacattgacaaattgaatctaatctctgtagaaccgaatcattatgatttggttctttttttgcataaaataaaggcgaaaagaacctaccttttcgccctctgattaaattattaaaccttcaaaattattgccagaaagctggtgttaattatgaaagcccttcacagaaatattttagatcgtcttgatcaaattatcaatgatactggaaagcatattcatgattttatcgatgatcctcatgccttcactaggaagcggtttttagatgcagctacagtcattaaaactactattaatatgcaaggaaaagatttgaccagtgagttgtttagagcttttggccaaaaagctattaaaaataacgataaagtagtcagtacttccgcttatgtccaacgcaaaggtcagctttcacccgcatgttttaagcatattctaactgtatttaatcagaatttatttaatatccagttatttgatcataaatatcgtatatttgccattgatgggtctgattttaatcaaatctggaatcctaaatcagagaatatcgttggaaatctcaatcataaaggaaagccatattgccaaattcatgttaatgcactctatgacctgttaaataatacttatcaagactgcatctttcagcctaagtcaaagatggatgaacgtaaagccgccgttcaaatgcttaaaaagctaaattgcggaccatatatagttactatggatcgaggttataccggctttaacatgattgaaaattgtaatcgcctgcctaactgttattatgtcatacgtactaaaacgggatatggcgcatttaaggaagtagctgagttgcctaatcaagagtgtgataaggatatagcttgctgggtgactacctctaattattattatgaaacccataaggctacagaaaacgttcatttggttaaccatcattaccgtcaatatataaaatatcggtctaaaaataccaaagatggcagctgggactttggagagttatgtacaataaaatttcgtgcctgtaaatttagaattaatgatcctaaatcaggcaaagaagaatgggaagttgttctaactaatctaaatagagccgattatcccttaaaaaggatcaaagaaatctaccatttgcgctggggcattgaaacttcattcaaaaagttgaaatatgctttaggtagcgtacagtttcattccaagcaggatagatttattgaaatggagatctatgcccacatgattatgtttaacgcagtcagtcaaattgatgctcaagcatatgtaccacaaaaaaaatgcaagtatcaatatgcgatcaatttcaaacagtcatgttttgtcatccaggctatgtatataatttcttcttcaactgaaatctttaaaaagattcttattcaaattagtcattacacaattccgatcagaccaggacgaaaagacaaaagaaatctcaaacccaaatcagctgtatattatttatatcgtgtagcctaatttctaaacaagatttgggtttatttggcatgaaaaaagagcattcaaatgcgataaatcgcaaatgaatgatcttaaaagtccaagtcgataatttgtcaatgtcttaacttaatgacattgctatatggggatgatctttttaaaactcattttttattttgaattgagtttacaaaaaatagcgcttttttacgttttaaataatatccttattttccttaatgcgagctaatttccagcccgtatcaaaatacgtcttgcgcgtttgacgcaaatcatcataatcactttgtaaactatcaatgtcatcctgtaagctcttattttgctttctaatcgcatttagctcaggatcattgataacacccttaaggtgtacttgagccgctaaatagcgccgacgatgctcaaattcttctctcaaagtacccagcgcatcttcatacttaactagctttttattgatctcagaaatttgatcattcagttgaataaacaacttataaggcatatccgacttaattcggttgcattccgcacaagctaaagttaaattatctaagctgttgttgtgactaagagaaacgggatccttatgatctacgctgtggccacgtctgccgcaatattggcagcggtatttatacttggcccgaatgcgttcacgatcaataaaatcaacttcgtttaactggaaattgatctccaaacccattccctttaaattttgctcaaaagttacgccttggttaggcacataattaagcttgccatcttcgcttttaattaccgccaaattcaaatcagaccttttaatctgttggcgggcgatttcattgccatcataatcttgtaaaaaggcctcgtattttttacggtcctttttatttttcacaataaaacctgattgatcttgtttctttgcaccgacaaacgtgtaaagcaagctttgagcaaaagctgcgaccgcatcatttgcgtaatcttctggattcaggttgcgcgtgatacaaatgtcgcaaatactggtcaacttaggattcattaacccctcttgcttaaaatgcaaagagtccatgcgcagcccgcatgaactacattgaaatttcacctaatcatcccctaacaatagaatgctaaaagctattcgttgcatcttatcctttcccgcgaaatcacctttaaaaagatctggcaaaattttcttaataaagtattgtacgcaaactaaatcgtcgaacttcttgatcgtttcaagactttccttgaacatttgcatataaaccgggttaggattacctaattcgatttctccataagcttcatataacaaatctaatttatcacagattgataaaattttaccctctaaagtatcatctttgccttctgagagacgtttagtataaatttcttgaaattcttctggaatctcatccttaatgaacttagtggtcattgtttcttcaacgtcaccaatcatctttctaagttgaggagtagcgtatttaacaggtgtcttaatatcaccgatgaaacgttcagtataatcgtgattcaagctcttttcatataaagccttccagttgatcttctttttgccctttacctcttcaatatctcccatcatttgtgctaattccgctgttctgaagcagtggtcagctactgagtggtgatgatacttgaagtagcccggtgctcgatcaattgactctaaactgttaaaaccttgaatgtatgcatttaatcccattttttgtcctcctcattttccttaaaatttttactatgttatcaaagattgattttcaatgcaaataaaaagaggcctttgcctcttaaaatctatgcgccggtgtcagtatcgttgccatcgtcgttagtgctgcatcatagtaattatttttaggtaattttttagcaaaaatatattgctgcgaagcaaacaaattatcatagccttgattgcgattttcattcaccgcaatataaattggcgcgctaaagctagctgattgataattattgaccggcttgccttttaaagtatagcctgctgtaattgtattttgcttgctaaaaaatttaagcaagcgatgtacagtattctttgctaatttatccttactaaatgctaaatccattggcacccggcaagcattggcataataatcaccatcatatcgatcagtggtaacccttcctttaactggcttagcatcttttgatgtcagccaggcaaagtctggaactaggccactcttatgctggtgactcaactgattgagccgcttgagcattgtttttttaattaagagccaccgcgaatcattgctttcacgataaaattgatcaaacattgtcggcaatacatctgaagtccgcattaaattataatacttcgacttagaatcggcccaattgcccaccgttaaagcgtgcgttgtcggattatattcataacgcaaaatatcggcaattaatttttgcccttgccgctgatatgctggggttttccatcttttagccgctaaaaacaaagctttagcaataaataagtccccatcagtagcgctattgcgttcactgctccattttccatttttctttgtttgccgccaagccatcaattgcgtattacgatcccggtgttttaaataatactgcactagcttagcaaagttgctttctttaactgctggatcatgcgccgcaataaacatcccatatccttggccttcagataaaaccgtcacttgttcctgcttaggcgtggtattaatataggcaagattcttttcttcaactacataatttttatgccaagaatgtagaaaaaaattacgcaccgctgaattattatctgctctgatatagatcataataccggtaaatgcaatcgttacgagtaaaaatcctagtagcatccatctttttttcatctcatcacctaatccgcaaatctcttagtcttaacccatttagtactatcacgatgaaaaacgcgatctagcattactgaagtaaccgcatgaattgatacaatgatgaacaattgcgaataagtaaaatatgatgctaaggctagccaaatctgttcgtcagttgcctgcccatattgcgtagtcatcgctaggttaatttgcaaaatataaagcaaaaccatcaatagccaattaaagagcagaatttgagctaataaaatattactccgcgaaattgtaaatggtattactactgcaggattccaaagatggacgattaaggcaatcaaattagaaaaaaagatcagatctgataaaacaatcgccaaattaaaccagaaaaaagtgcaggaataatagacagtctctaatttaacccgccagttgcttttatcaaaaagatggcaaaaattattgatcaccacttcatagttacctttagcccaacgcaagcgctggaaataataatcttttaagcgttctggttcttgctggaaggcttcagaattataggctaaggcaatcaaactacctgagcccataattttaaaagaaatatcagtatcttcggtcaaagcgccattgcgccagccgccaattgatctgacataatcagtattaataataaagttagtccctggaatacgaccaatcttaaataattgccagataccgcagtgttgaattcgctgggtaacaacaatttcctgattgatacacttagttaaaaaattctgccgcgcatttctcgtcttattgcgaccaaaagtagccttatatctcaccggattttccaaaatctttttaattaaaaaatacaaagcattttcttctggcatggcatctgcatcatatacaccaaggtattctccttgggcaatcttcaaagcatcatttaatacaccagctttgccaccactacctgttcgttcaattacttgaacattgattttccgttcaggatattgcttgattatttcccgggcaattttagcagtatcatcagtacaattatcagcatagattaaaatttgtaacttatcagccggataattcaaatttaaaattgcctgcgtagttttactaataactaattcttcattatgagctggtacaactaacgtaacttttgggtaacgcttaagtggcgtgattttaactaagagcttgctgtgctttaaccttggtaatcatttcatcatcaactttagctaaagccaaggccatgatttccttaatcaggtttaagaagaaacagattatttttctttcacgcttaatataattatcttcagactttataatatttgcgatttcagttacaattgaattcataaaagaccagcttctaatgtgttttttgttcttaacatcagactactggtctttttgtttgagctcaagtccaaattcaaaggacttgggcttttttaattatttattcaacttaccgtaaaaaattatacacttagaattaattttttcagtaagcacaaaaaaagctagaagcgtcagctcctagcttttatttcaatattattaaagactacttgttttcgtcttttgcggccttgttcaagaaagcaacaactgctgctacgtgagcaacacgcttctttgcgtttctcttgttcttaggtctttgatttggttcacaaccagtgttgtaattttcacctttacgcatatgctatacttcctttcagattttcgaaaatctagtatagtttaccatgtccagcccttcagatcaagtcttcatgcagattcaaaatttttcgacagatgcaggacaacaatataatttaagattcgcgtagcataactagcatccttttggaaacttttaattgcctttttagctaaatcaactcgatcagtaattaagccatcaacttgttgatacatcatcttcttcattaatttttcgtcattaactgtccaggcataaacaggacgatcctgcaaatgggcttgccaaataaagtctgaattcaaggtagaatattccattgaatatccactagcaacactttgcggataagtaaaattataaggttgaatgtaaaagacaaccaaacgtggattaattaagtgcagtccttcaaccacgcgatagtcgagtgattgtacttgatacgcatttttaagaatcgttttgccatatttttgattaaagcgctgcagcattttcttcgaatctttagccgtcgttttaatttcaattagcaatttttgatgcagtcttttggcttcctcaagatattgatcaaagctaactaacttagcatgatagccgtcttctttggcagttaacttttctaattgccgtaaagttaaatcattcggggctttattaactcccgttagcttcaataaattctcatcatgaattacgataaattttttatccttagtttcatgaacatcaatttcaacgtagtttggcttttctttagccgtttttcttaatgactgtaacgtgttttgtacgccatttttatcatcaacgccgcgatgagaaataattactggcgctttagcatttacactagtcaaatataaataattggtagatattgcattaatcattactagtacaaacacaactaatgtacttagaattatctttttagttttacctgtttgacttatcttttcttgccttaaagctttcaaaataatagataagcccagtacactaacatagactaacgctacttcactaataatttgaacaagcgaaagattgctaatggctaaaattaacggacatttcccaggtaataaatcaactaatagctgcaggcaatacattgctaaatagaaaattgtcatgactgctgcagataaaacggctaaaacaataatcctccagcaaatcgtccgccaacggtagtgcgccgttaatcgccaacttctttttactgcttgcactgactttaagtggtcaaaaacgatgatgggtaaagcaaatactagccttgcaccaaggatcaaagcggctaaataaaacgcaatcaaaacggctaacaagattggcgttctcgtcagataatccaagataaattctgaaatctgcactttgcttaaaagtggtgttctaaagatgacatcggctaacggtactaccaataaaaaatagagcatcaaaataaaaagcgtgcccaaacgaatttttttgatattttgccaagtttgaataaaactatttttccacgtaaaaacttgatgcttaatatcccaaacgccatgaagtaaataagctaattgcgcatacaagattactaataaaagcagcaactcaattatcaaaattaaaaaggcaaccgtatgcgtcgtaatgatcgtcactacatttcgataagatacgaacggaatagcactagcctgcaaaacaaaggttgtaatatagcgaaaaagtggaataacaataaattgattaaataaacttaatcccataaaaagtagcagataccgcagccaattttggcaaaattcacgactacctgcttttatttctttgacaaaagtcattgttcttccccccttacattgaaatcactttcttaattctatactaaaaaaggacgaggtcattccctcgtccctatgattaattttatttttttaacattgaccgccgttttttagatcatcagcagtaattgcttcaggttcatattgggtaacggtcatcccaccatcaataatgccgctgtctgaagataaactcaaagttgagttgcgtgcatttaccactagacctggttcaaagaaagttgtttccggctgagcagtatacaagtcaagaccagcattattttcgattgaaatattatacttaggatctttttcagcaaggattacaaactggaagctgtcgccaatagtacaagtgccgccttttttagaatacttggttgaaccatcatctaaagccaagataacaatttggtgatctgcatccatcttgcttttaatcatttctgcagcatctggtttaatattgattgaaattgcattctctgtcattttgtttcctcgtttcaatctaaattttattaacttacttatttaagtatagcacgactagttccaactaactaaaaatatgctcaaaaataccgctaatcttgatatttttttaaatttatcattgcatgcaataacaaaaaggctcaaaatggtacatagggtttttagacgattgtaatacgtaagggggaccttttatgaccgtcttaaagaatattgctaaagatagaattttacagattactgtgatcattacagtagtcagtcttttttttgccagaccgcggtttgcggacattaacttccatacattatggtctgttgccgcgatgttaacgattatccagatctatgcatacttgcatgttctggatgttttagcgtacaagcttacaagtattgccgataatacgcgtaagttgaacacgctgttttcgttgttggctgtcatttcggggatgtttttaggtaatgacattactgcattgaccttgatcccactgtatttaaatattgctaagcgttataaattgccacagattttgcctgttaccttgattgggatgggcgcaaatattggggcagcatttacgccttggggcaacccccacaatattttctcagtcagccgctttgatgtcagcccattaaaatttttcgaatggtctgtaccttatctagtagtttcaatgctaatcatgggattagtctttctgtttattcctaaagaagaaattccggtgcaaaaagctgagccaatcaagatcagctggcgcccgacgctgataactactgctgtctttattttcttcttctttggtgttttcagaaccattgatattatttggcaaatgctaacgtcggttgcattagcccttgcaattaatcctaggattatgctcaaaatcgactatgccttacttcttacctttaccggcttcttcatcttcatcagcgatatccaacaaatccctcttatcgtaaatctaattcatggcaccgtttattctgaaatttcaacttactttgcttcaattatctctagtcaggtaatgagcaatgtaccatcaaccattttagttggtaaatttaccacttatgctcaagcattattcttgggttcaaacattggtggttttggttccgctatcggttcaatggctaatatgttagttcttaagactttcaaccaacacggtagcgtaagtaagaaaaagttttttattcaatggactattatgcaatttgctggtttgattattttaactgcagttggattattactattaatcttcagaatttaatattttttgttaagaatgccgctttgacattcttttttattgctcaagaaattcgaaaacgataaaattaaataaatattttatggaggaaaaactatgtcacctttaatttggatcattttagctattattgttttaatcgtggctatctacatagtaacttacaacggtttacaaagagcgaaagtctatgctgaagaagcttggagtcaaattgacgttcaacttaagcgccggaatgacttaattcccaacttggttgaaaccaccaaaggctatgccaagcatgaaaaatcaacttttgaggaagtagtcaaattacgtaatcaattggttaatgtgcctcaaggtaaccatgaagaagcgatgaagctttctaaccaaattactgattctctgaagtcaatttttgctttggctgaagcctacccagacttgaaagctaatcaaaacttcttaaaattgcaagaagaattgactaacactgaaaacaagatcgcttactctcgtcaactttataattcaactgtagcaacatatgatcaaaagttgcttactttcccatcaaatattgttgccaagtggcaccactttactaagattaactacttagaaactcctagtgaagaaaagaatgtgcctcaagttaagttttaattttaaggaagtttaaccatgctttaccaacaaattgctcgtaataaacgcaaaacggcgttaattatgttcatctttttggtgatcttaggcttagttggtgcgggaatcggttatctttggagcaatagtccaacaatgggcgttactattgctttgatcggtagtttagtctacttattcatcatgtggcaaaatccagccaacatgattatgagcttgaatcacgcgcaagaaattcatgaagccgacaatccggaactgtggcatatcgtagaagatatggcgatggtggcacaggttccaatgccacgggtctatattattcctgatcctagtcccaatgcttttgcaactggtcgggaccctgaacatagtgcggtggcagttactcaaggaattttagaattacttgatcgtgaagaactcgaaggcgtcttagggcatgaattatcacacgtgaaaaactacgatattttactttcaacaattgccgtggtattagttggggtcatttcttttatctctaatatggcgtccaattttgggttctggggcggcgtgcgcagtgatgacgacgatgaccgtgacagtaatgctttagccataatttttaaagtggttgccttggtctttgtgttgatcttaggcccactttctgcatccctagcccaaatggctttatcgcgtaaccgtgaatacctagctgatgcatcttcagttaaattaacacgtaatccgcaaggcttaatttctgccttacgcaagattgaaaatagccaaccaatgaaagtagctgatagtagtagtgctggattatatattgaaaatccattccacaatcacggtttgacgcacttgtttgatactcacccaccaacagcagaccgcattaaacgcttagaaaatatgtaaaaaataatctggaactttcgtccagattatttttttactttaaattgatatttgcttgtctaaacaattctgcccgcatcgctgctggtgttatgtggtagtattgattaaatttcttataaaagaaagacttactcgaatatccgactcgaccaataatctctctaagtgaaatatcaggctgagccagcaattcacgcgcttcttgcattctttgatcatccacgtgatccacaaaactcttgccagtcttagccttaaccatattagagaaataattaggattgaagccaaagtattttgcagcgtcagataaagagacatcggcaaaatgaagatcgatgtaattatctaaggtcttcttttcaaacttagttttatccaaactagtcggtgttgccatgcgctgagttctaattgaaataatcaacatagtggtcaactcagcctgaattaaagctttagtaaacaaatcattattcaaataaccgccaataatatgttgcatcacttgagaagcacgagtaatttgattattttttagccaaagaacatgttcattttctaagctatcaacgatttgctcaataactttaacctcacgttctcccttacagctaaaatctttaaaatacttgcgatatagaaatccacgcttaaacttcaactttatcagtaccgtatcaggtttttgacttaaaatctcatacttgcaaccttcagtcagtagcaaaacattcccagacttcatttgaatgatcttttcaccactcttaattgtcacagtacccttagcaatatataaaatcgttgaaacatccatccgatagcgatgaataccagtattatgattttcaaggtagatagtaaacagatcaaaatctggattaccagcttccaactttatttcattcttatctgttgaatttgactttaatacacttgccagatattggtccaaagcaacagctgccatatgtccaccttccttaaattaaataaaatatggtaacactataattacattataaatcaaaactttatttagtattaagtattatttatgatttgttctacttataacaaactctacctgtagacagtccccaaagcatcttgtacaatcaagcttatgaaagtaaccgttaacaatcttactttttcttatgaaaaagaacctattatcaatcatctaaatattgaaattccccatggtttttctctgttaattggaccgaccggctgcggtaaatctaccttactcaaaattatcgctggtttgtatcccaaatatgcagggcgactaacaggtatggtggacctgcacggacaaaaggcggcaatgatgttccaaaatgcggctgaacagtttacaatgccaactccacgtgaagaaattgtctttgctttagaaaatttacagttagatgaaggtgagtatcaaacacgactagatcaggcaacagctttcacccaaattgcagaccttctcgatcaaaagattaatactctatcaggcggtcagcaacaaagagttgctttagctgtcttaatagctatggatgtagatttattgctcttagatgaaccgtttgccagttgtgatcctaagacacgtgcttttttgattaaaaaattagcgattttagctcacaacggaaaaactattattttaagtgaccacgttttagacgattatgaacctgtctgcgaccatctttttgagtttacaaataatcaagaagttattgaattaaatgctagcaaaaaaatagccttatttgaacaaaataaaaaattgcatgagcgacattatcattttgtcttacctaatagtgagcctattttcactttaaaacaagtccaaattagacaaaacaagcttttgcttaagcaaaatgagctaaatttgcattctggcactaccctaattactggtgctaatggtgttggcaagacgtctttatttaaagtaatgaccaaaatgattccgtatactggtaattttgcttatttaaataaggaaatcgctcaaatctcagctagaaaatatttaacacaagtagctcaaatttttcaaaaagcaagcgaccaatttttagctgtgactgtcaaagatgaactagaattaagtaaaaaggatagaaatttattttttactgaagaaaaggtcaatgaatggctagataaattgggtttagccaaacacttagaccaagttgtttattctctctcaggtggccaacagaagaaattacagattctattaatgctaatgactaagcatcaggttttattaattgatgaaccgctcagtggacttgaccataactcggtcaaactcgttttagaattaatgcgagaaagccagcaaaagctccaccagacgttttttatcattagccatcagatagacgagctagctgaattttgcgattaccacctgatttttgcggatcagcgcttaaaatatgtagaaagataagcttatgaatcctagtttaaaatttcttttagcatttattatttccctggaaatatctttaaaagctagcttagttactaatttgttagtaatcaccttcgcgctagtttatttaattattactcgattcaaaatcaaagagttaatcttgctcattatcttgccctttattgctgcttttacaatctttgcaacgctcttttggttttcaccaacaccaaatgcttattatgcttggaatttgtcaacgcgtatctatgtttataccttgacgattgcctgcgtgacacgtaataacaccgctacagactttgcccgatcattagagcagaacctgcacttacccagtaaatttgcctacggcgtgctggcggcgattaacattattccgcagatgaagatggcggttaaacagatccgaactagcgctatgatgcggggcatttatctcagtttttggtcgccggtcctctattttaaagcaattcttgttgctttaaattcagctgacaatctggcccaaggaatggaatcacatggctatgtcgaagggcaaagaaggtcgacgatcatcgctattcctttaccagctagagattgggtaatcttctttaccctgctaattttggttaatatctcattgtttttgttcaaataggtgaaaaaatggaaattatcgaaggaaaaatgcctttcatgggctatgaaacttactatcgtattgttggtcgaagaagcgaaaagacaccactcgtattgctacatggtggtcccggctcaagtcataattattttgaggttttggacaaattagccgaaattgataaccgacggattatcatgtacgaccagttaggctgcggcaagagtagcatccctgatgatcaccctgaactttatactaaagaaacatgggttaaggaactcatggcgttgcgggagcacttggctttgcgcaaaatacatttattaggacaaagttggggtgggatgctagcgctaatctacatgtgtgattatcatcctgttggcattcaaagcttgatcttgtcttcaaccttgtcgtctgcttccttatggagcaaagaattacaccggatgattaaatacttgccaattgaagaacaggcggcaattcatcgcgccgaattgactagcaattttaacgatcctgattacttaaaagctaatgagcacttcatgaatcaacatgcaattgacatgacgaaaacgtggcctgaatgcgttatgcgaaaaaaatgtggtggtattgtagcttatgaaaccgcctggggaccaaatgaatatacgccagagggcaacttgcacgattacgaatacacagaaaaactaggcaaaataaaaatcccaactctaattacgagtgggactgatgatttatgtacaccttatgtagctaaaacgatgcaggatcagcttgctggcagtaaatggcagctatttgaaaactgcggtcacatgtcttttgtagaaaaaacagatgaatatgttgaaatgctgcgaaagtggcttgatcaacatgactaaaaagtaaatatatttacataaaattaataactcaacgcccgatgagcatctaaagcccaatgcgttgcaaaaatttcctgcttgattttccgcttggttccagtccaaggatcattataatagatcgttttaccatggtaacccgtcaaggtaatagcatggttagagaggccgtcaaacatccctacccaaacaaccaccaagtgtgaattaatcagcttatccttaattgcgggcaaaccacaattaatcatattctgtgctctaccaagataatgcttcactactggtttcaccccattaggagcaacccaatagccgagcggatatttcttgtaaggcgaaccgataaagcccttgttagggttagagctgcgcggcataatcttggccgcctgctgtttagttacctttttaccagcaaaattaatcatcattgtcacggcagtaatttcacaaccagttggcatttcaggtagttggctaattaccttggcgtagttattaataccaactatcttgccgcttttattaatccaataatatgcttttttagtcttggtatttttaaaacgttgcttgcctgcttgatcaaaatagacataatgtttaccaacttttttaaggccagtatacttaggagccgattgattagttgtcgcggcatcatcattatcagcggcatgtactgtttggcgagttaacaataatgaactaaagcccaggctgactaataaaatagctaagtattttttcatatttttccttaaataaatggtcgcttaataccagcaattacatttctttgtgaattaacaattggttgaaccatcacacgtggtggccagctttcaattacccggttattgcctaagtaaatcgcaacatgccaaatagtgtgcgtacctggttggtaatagaacactaagtctccacattgtctttgtgaatatggaacacgctttaggtgcttgtcagcccaaagattacgtgaattccattcattgcctggatgagcgtggccgattgaactagttggaactggactaatgccacctgcataaagaccttgcattaccaaaccagaacaatcaacaccgtagcttggactagttgaacaacctgctaaccatggttttcccatatatttgtaagcttgattaatcattgcttcaatatgagctttacgcccttgccaagcataagccttaagtggggcaacataactatcaatgctataccatgacttcttagaaaagcccatcttttcccaagtagctaagttaacattaccagttgctggcaagtggtgactacgttggaagttctttactgcgttataagtagcttggttatagtaattcgtacctgcccaagtaccaactctatgcattactttccaagtcttaataccctcatagccacggtacaagttataacccaccttaccgtatggtttaacttgtgtgtaatgtacttgatgataacccttaggattttggtaggctatgaccttagttaccaaagattttttagcaggcaaatacaagccatcactagtctttagtattggtacttggttgtcagatttaacaattcgactaattaaaaagtgtgatcctgcttttacgctctgtgctgatttagtcaatgcagcatccttataagcagtagttgcatgcttaattcgcactaatttagggttagcagacaaataatctgccttgttataagtaaccttatctgaatcagaattagtttggtcactagttgcagttacttgcgtctcattagtattagctgttgtgttagtatcgtcagccttaacagtagttgcggcagtacttacggcaactaaagcagcaataacagctgctgtccatcgttttctcattccaacatcctccatgatatttgtaaaatcaatttcattttaccttgattacagaagattttctatggtttttgaggcaaaaaaacagcaactattatgttgctgtcgtaaatgatattcaacttctaattaaagtttgatgttcttacatattgcttagcaggtccgccaattctgtaatagcgtttgccattcttaaacttgtatgaaccaccgtaagttgtcactgtggagcctttgtacaacttccaagcaccgttatgcgtagtgcgttttttttgatgtactgtagatgtaggcgttacgctttaaaacgcgaccttgaccactaatattggtcaccttaatataagcatccctatcagccaacttgtagaatttagcgccattaattgttatgggactttgatttacagttactgcacgatatgcgtaatacttttcacccaatgacttgccattttcatcataaaaaaagccgccccgaaggacggctgtattgagtctacctccttccacacgagtaagggcgctaccccttcagctaagtgtataattttttacggtaagttgaataaataattaaaaaagcccaagtcctttgaatttggacttgagctcaaacaaaaagaccagtagtctgatgttaagaacaaaaaacacattagaagctggtcttttatgaattcaattgtaactgaaatcgcaaatattataaagtctgaagataattatattaagcgtgaaagaaaaataatctgtttcttcttaaacctgattaaggaaatcatggccttggctttagctaaagttgatgatgaaatgattaccaaggttaaagcacagggctatcagattgataagaagaatgagcgctcaatcaatatggcttttggcgaagttaggtatgtcagaagaagatatgtctgcccaggcaaacaagcaaggtatcccttggatgaattaatgggcttttacaaatacaagcgctacagtattttagcagtcaaaaacatcttagaagtaagcagcgttgccacttatcgcaatactgctctagcagtcaattgcctgtctggctttaatattagccatatgcaggtgggcaatttggtaaaaatggccgggaaaaatattaaagcgggccaagaagcagattcaagatatgatgccgcaggcactaagaaaaaggtcccagttttgtatcttgaaggcgatggcgtggtgatcaaaggcactaaaagccggttggaatttcatcgctatcaggtctgtgaaggcattgtcaatataagcaagaaacgcagaaagcgaatcaatgccaaggaatttgtttctttaagccgacttgatgcgctgaacgaagccaaggagtacctggccaatacttatgatctttctgatactgtaattcttagcaacgccgatggcggtgctggatatgccaaaacagacttcgatgacattgtagggctatgcaagcgtcatgagcatttcttggatgtctttcacctaaataagaaaatcaaagaaaggctatattttgcgcctgacctgcaaggcaagctgatttctgctttggaatacaaatacagctatgacaaagttaaaactatcctaaccactgcagaaagccgactaattgatgaattgaataccgagctcaatcatgattatctggggcgcctaaggaattatattgatcgtcattgggacgatattaagccgtttaagaaacgaaaactgactgtgactaaagccattggctgctgcgagagcaaccaccgcaagtatacctaccgtgttaaggggcaaggcaagaaatggtcaaaatctggagcagaaggcatgcttaggatcttaagctgcatcaagaatcgagagctggaattttggcttagcagcgagtttgaagattcagaaataactgtattgactgaacaggaattaaaagcagcggcccgtgacagcttaaagaagcgtcatgaagttcatttaggcatccagcatggcgcattaaccgcacaggtagctggcaatagttatttaagcaagctaagcagaaatttaagtcatataaatatttaagaaattaaggttagactaatggtttaaaggctaccgcaaaaacattgacacttacccccttcagcgtgcagttttaattttaccatttatgtgttaaaattgagatactacaaagataaagtacacttcagcgtgtgcgtgagctactagctggtagctcaaaaattatcagggcgatcgaaagatcgtcttttttgttgccaaacataatttaacaaaatctatttttaaatcataaaaaactaaaaaagcactgacctgccacagtttttttcaatatgcttgtgaaatctgcaaatatgcaaaaataaaaagcccaatttatgggctttttctatattctacttatgataaggactacctgagttaatcataaatgcacgatagatttgttcaatcaacaccacgcgcatcaactggtgtggcatcgtcaatttaccaaaactaatcaagtcatttcccctcttgtttacagcatcgctagtccctaaactgccaccaatgacaaacgtaatgtctgaatgaccataagttgcgagatcctgaatctctttagcgaactcttcgctgctgcgctgctttcctttaattgcagtcacatacacgtactccttatctttaattttgctcaggattcgctgaccttcaatctctttaaccttctcatcttcagctgcactgaatttttccggtgctttttcatcaggcacctgtacaatggacacctttgcaaaacgactgagtcgtttctcatactccgcaattgcatccctaaaatacttctcttttaattttccaacacatacaattttgatattcatgcttctattataacaagcatagctaattttccattcataattttaatctaccagcacaatactaacatcccttccacactatttacccaaacttttccacaaaacttcaaagaccaatttcaacattttgtggtattattttacttataccccagaagttgtatttaataatttttctaaaatttctttattcacatcgattttatgaaagccttttttcacaaactttatctcttaaggcttgttatgcctgcatgaacgcctgttttctcaaatagaattcactaaataaggtcaaaatcatcatatttttccacaagttaataaacctatatttatcaagttatacacaatccacagagttatccacacttatcaacaggctagtgtctgtttgacaacaaataattccgaacaatttgatgttacacatttaaaaagttaacaaaaaggctatatctacgtttaaaccgcgtgatatagccttttttcttttaattaacttctattttgatttttagttaccctcaagttttacctttaagttgacatccttaccatttctgttcacggtaacatttacggtatcaccgactttatggctgtataaaatgctgtgtaacgatgccacatcatcaatcttcttgccgtcaaccttggtaataacgtcgccgctcttcattccggcattagcagctgaactattcttgtttactgaggcaatgtaaataccactcttcaaagtagaatttatcttcaagcggcttctgtagccttctggaataccttgaagtgcgattacccttacgccaagttgtggacgggtaatcttacccttcttaactaattcgttcacaatcgtaactacttcgtttgatggaattgcaaagcccattccttcgacagaagtaccatcacttgattgggctaacttcattgagttaatcccgatcacttgaccagctgagttaaccaaggcaccacctgagttacctgggttaattgcggcatcagtttgaataaccgtttgttgattgcctgatgaagtagaaatggttctagccggtgctgaaataatcccttgcgttaccgtagaagcatattcactacctaatggtgaaccaacggcaatgacagtttgaccagcttgtaagctcttagaatcgccaaattcggccgtcttagtcacatacttagcatcaattgaaagcacagctaagtcagttgtactatccttaccaacaactttagcatttactgtcttgccattagctagcattacctgaacagcatcactgcctgagataacgtggttgttagtaacgatatagcccttgccattagatttcatgtagactacacctgagccttcactgtaagtctcaagcttgcccttgctgcttgatgaatagctatcatcactgtcatcattaccgaataaactattataaagtgaattagtactattagaacttgattggcgttttaagttaataactgaaacaaccgctccttttacatcattatatgcagtagtcattgtgccactagtcttagcactcttttctgaaactttactactacttgaagatacactagtttgagcggcaccattattaactgatgcattattcatttgatcagctgcgtaatatgaaacgcctccaccgatcaagccaccaactacaccgacaatcgctgcagtggcaatgattttaccattagtattcttttttctaggttgttgtaaattgttattattattttgattttctaccatgcttgcttctcccctcatcttgtttactaatcataccgattaaatttgaatattatatgaaaaaatgttgtgaaaactgctaaatttcaactaattttgtaggctgattaggttctgtatcaataatcttaacatcatcatccaaattcgcatccccctcaagcagcatttcctttgccgtttcgtgagctaaatactccgtattattatgttggctgcgatgcgctaaaaagatatgctttgttttaggtgtgactacatcaactaatgcctgggctgcttcgtcattagataaatggcctacatccgacaaaattcgctgcttcagtgcccaggaatatggtccatctctgagcatcatattatcataattaaattccatcatataggcatcagcatcttcaattgtcccttcaacttcttctgatacataacctgtatcagttaaaaaagcgacccgcttaccaccactagtaaacacataatattgcggctcagctgcgtcatgactagttgcaaaggcagtaatatcaacatcaccaaaagttttagtttggcctggttcaattgtattcatttgttcagccggtaatttacctatttttttcgtatccaataaatactgccaagtcccactattggcaaaagcatctatcttaggataacggcgcatcaacacgccgagtccgccactatgatcggtatgatcatgacttaaaaaggccatatcaatctcgttaatatcaactccaacttcggctagcaaatctttagttttcttaccagaaatgccagcatccatcaggattttatgctggcctgtaacgattaaactggtattgccggtcgagccgcttgctaaaacggaaaccttcaatttttgtcccttctacttttctacattataggtactcgattgtagcatctgtgccgtatatgcattaatacgtttcatcgtgatatttttagttgtcttattttctacccaaaccagccaagttggcaacaagattgtgctgccacgtacttctgtcagtttggagtaacctaattttacctgcgttacgcgcgaattattagtcaactcacgatcagtgtacatcgcacgcacagcacgccaagcactgatggttgactgtaattcacgcactggactagcttgccccatatatgtttcagtaaaattaataatctgattatcttttacattgatattcaattgggccgagttagcataaatttcaccataatctgagttttgcacaaaaacataattgtcttcactcgacatatcaggttcatacttgaattctttaccataaggaatatttttcgaatcattcttaaaatcttcaatttgttctaaagcttccttaggttttttactcaaaaggactgcttgtcttggttcaccataaagcacattatcgcttttagaatagcgggcatttacattagtcagcgagctaactttgccagagagatagtcacgattcttggtagctaaataataaccagaatctggtgcatccgaaatcttatcgggcaaatcaatattgtctgacttcatttcattgcggatgctagcaacactacgagtagtggtatcagcgttacttaaattaacgggagaacggagaatttcgattccaagataaatatcaattaaaaagaaaacaacgaaaaatagccattcgattcgtttatggtccatttctattttcccccttcgttaacagttaactgatcagcttcacggtaggtagatacgtcttgcttttcccattcacctaggctcttccattcatcgtaggctttgatatagtacgttgggatcaagttaatcaaactatggtgacttgaatccttttcttcagcaaaaccaacgataattcgttgaatatcttcctgctttaggccgtgattgactaattcatcaacaacatcttgggttggttttaaccgcttagtttgaccatcaaacggaattggaatttggaagtttacactattaaaggccacattaatcgaatctgttgaaaaggtcgtcttgacttgcaaatcatgcttatttaagaaaacaggaatcccttcaatatagtttagataactaacattagcaccatctgcatcaaagaagcgtaaatcttgctcggttaaacccaattggtgaacataataaacgctatctaataagcggttagtagtattggggatcttatttttttcataatgagtataaagataattatgctcacctgaattagaatctggcactcttaagcgagtatagtagttcaaagaatataccgtttgaccattcttattagtcttactagtaacgccagatgtacctaataaacgcgaaacaaagtaagaatacgattgatgattagtcaagtaactataaactttagcattcattgtcttgatgtaaaacggtgaatagccttcctttaaacgaactaatctaactggatacttgctcttagcattacatgcatatttacgtagtttatcaaaatttgcgccagcaatttttacttgataaatttcattagtctgatcatttcccaaataaatccagtgatttgactgcgagataaagaagcggttaaactcgcggttatcatttgcggcattattcaactggttaaataaggagaaagtaatttcatctggataaaccaactgcacatagttgggattgtttaaatactcttcatatttagttctagtatcaactattttcttaattttattagtggccttggctttttttatctctttggtaaattctaaagtcaaattattttttgaatcatatagctgacacaaatttccattagcaaaaccatatgaagtagttggaatatataaatcatataatgacttaaaattgtgactacgcgtttgctctttagtgatattattttgattttgctgaccaatattactaaagcgctgatcactagtcataataaagatccaaagcacaattgagaggacaatgacgatcagtgtagctaagcctaagaaaaattcaccgaatttgaatttaaacttcatcccaatcatcctcctctgtcatcggttcatatggcaaggaaatatagaaagtagaccccttgccttcgctactgtcagcccaaattttaccatggtgagcttccacaatttctttagcaatggccaagcccaagccggtaccaccttgggcccgggaacgtgccttatcaactcggtaaaagcggtcaaagattttacccagatcttttcttggaatacccaagccctggtcagaaatacttaagataacatgattttggttttgggtcattctaacagtaattacaccgccatcaggtgaatacttaattgcattgttcataatgttatcaattacctgcatcatcttatcggtatcgatttccacccataaggcttgactgcctaattcacgcttaattgtgtatttcttcttttctttatttttatctgttttaacaatcatatcgaaacggttaagaatatggttaacaaaatcgtttaagttaacaaattctagatccatttttgaaacgccacggtccattctagacaaactcaacaagtcattgatcattctaatcatccgactagtttcttgttgggtaacttccaaaaacttaggagcaatctctggattcttccaagcaccctcattaagagcttcaatataagcctgcaaacttgttaaaggtgttctcaattcgtgtgagacattagaaacaaactgtctttgtgaatcttcattcttttgttgctcagttacatcgtgtaatacacaaactgaccctgatacaaagccagttacccgcttaatcaaagaaaaactagcatgcaaaataatttcatcccgcgtacctggatcaagggtaataacgatctctttttgactagaaatcaaatcttgtgacgaagtatcttctagtcccagtacttcagcaatcggcttattgataacctcgtcttcttttttatttaaaaagtttagtgccatatgattaaccacactgacgttaccatgacgatcagtggctagaactccatcgctcatgtgtgacagaacactatctagtcgccgccgttcactatcagactcttcttgtgagcgttcaattcgtacggacagggtattaaatgctttagctaattgccctagttcatcattggaataaatttttacctgacttgaataatcaccatcagcaatatgcaatgcttgtttctgcatttcttcgatcggttgcgtaattgcccgggaaataactaatgacaaaaatgcacctaataaagccgcgatcaatgacgcaatcaagaaagtcaatgaaatttggcgcaaattgttaaagacatcttgcatactagctttaacatagacagcaccaacagtattgttagagccattgccactagtcaacggcgatatttgaatcatgtaattgccatgatcatcgaccactttattaatttgatgtccagttgaaataacctgcttcacatcagtattgttaatccgttgaccgatcttacttttatcatttaagttagaaacggcacgaatcgtatccttattatcgacaacaataatttcactaattgcatcattattgtagtcattaacaatttgattcaagcgatcattagtatttttattatcactggtcaactgattagctaactgattgctgacgatagtctgaatctggattgatgattggaaattttcaatgctattttgctctaattgacgggtaaaataagctccaataacttcaattgttgccagtagcatcagcatgaacacaattgcaattttagtattaatggaattaaatgtactatttaatcttgctttgaattttttcattctactcattcaatatctaaaaaatataaaaaagaaagccactaccataacagtcaatgtcattaagttaagacattgacaattaagggtgcttttttagagatcgaatcatttggattcgatctctttttttgtataaaataaaggcgaaaagaccagccttttcgcctatcttatatattatatattttaaaccttcaaaattattgccagaaagatggtgttaattatgaaagcccttcataagaatattctagaacgtcttgatcaaattatcaataatactggggatcatattcacgattttattaataatcctcatgcttttaccaggaaacgcactttagatgcagcgacagtccttaaaactacaattaacatgcaaggtcagaatttaaacagtgaactctttagagcttttggcgaagatgcaactaaaaagaacgataaagtagttagtacttctgcctatgttcaacgcaaaagccagctttctcctgcttgttttaaacatattctgactgtttttaatcaaaatctatttaatattcaactttttgatcatcactaccgtttgtttgccattgatggctctgactttaatcaaatctggaatccgaaatcgaataacattgtacaagcttcttctcataaaaagaaaccctattgtcaaattcacgttaatgccttatatgatctattgaataatacctaccaggattgtatttttcagcctaaatcagaaatggatgaacgcaaagcggctgttcaaatgcttaaagctttgaattgtggtccatatattgtaacaatggatcgtggctacactagtttcaatatgattgaaaactgcaatcgcctgcctaactgtcattacataatacgaactaaggctggacaaggcggagttaaagaaataacgacattgcctgatcaagaatgtgatcgtgagatttcctgcctggtaactacttctaactattactacatcacgcataaagccagtgagaatattcaccatgtccagcatcattatcgccaatatattaagtatcgctctaaaaatacccaggatctaagctgggattttggcgagttatgcacaataaaatttcgagcctgcaaatttagaattaatgatgccaaatcaggcaaagaagaatgggaagttgtgctaaccaatcttgatcgaaaaaattatccgctaaaaagaattaaagagctttatcatctgcgttggggtattgagacctccttcaagaaattgaagtattctttaggcagtgtacagttccattccaaacaagataaatttattgaaatggaaatttatgcccatatgattatgtttaatgcaatcagtcaaattgatgcacaggcctatattccgcaaaagcattgcaagtatcaatatgccatcaatttcaagcaatcatgcttgattattcagagcatgtatttggcttcttctttaacgcaagattttgaacggatccttattcagatcagctattataccattccaattagaccaggccgcaaggacaagagaaatattaagcccaaatcagctgtatattatttatatcgcgtagcttaaaaaagcagaatctgtgctatgccttatttgttgtacgaaaaaagcaccaatttaaccaattaaatgttaaatcagtgctttaaaagtctaatattaattgtcaatgtcttaacttaatgacattgcataacagttctgtggctttctttattattcttcactcggctgttttacataatagccaacaccacgacgggtaactaaaatttgaggttggattggattatcttcaatcttttctcttaaacggtgcaccgttacgtctacagtccgcacatcaccgaagtagtcataaccccaaacagtctgaagcaggtgttcacgagtcataacttgtcccatatgttgagctaaatagtaaagaagttcaaattcacggtgagtaagttcaatcttcttaccatttttttctacaatataggcatctggcataatgaccaagttaccgatcttaatattcttatcggtctcttcttggctggcagcttctgcttttttaacaatatcacgacgacgcaggttagccttcacacgggcaactaattcccggttagaaaacggcttggttacgtagtcatctgcacccatttccagtcctaagactttatcaatttcagtatctttagcagttaccatgataattggcatgtcatgcgtttgacgaacttcacgcgcaacttccaacccatcttttttgggcaacatcaaatccagaatcattagatccgggtcgtattcgtcaacttttttaacagcttcttcgccatcataggcggtgtcgacatcaaagccttccttagttaaattaaatttgataatatcagaaatcggcttttcatcgtcgacgacgagaatcttctttggcatcgggaatgcctcctttgcccttacattatactgaattttgtaacattagccaaaaatttttgttttttttcaaaaaaagcttgcattttcttatcaacaatagcataataatatctgttgattgattcaacgacatgggtggctagctcagctggcagagcaacggactcttaatccgtgggtccagggttcgatcccctggccacccataatatttttcgtaagagataagatgttgatcttatctcttttttgtttcttaaattggatttagaaagggctttattggtaaaataaaattagaatttgtacgagggggctttacaatgaacgaagctgtattttttaatccaggggatgccatcgcatcttcacacgactttaaagaagcacgccgcagtgctcaaatcattaaggcagaacgtccaacagggcgccaaattgtgattgccaaaaatgatcaaagcggtgtctatgctgtttactatgcagatcacatgaagcaggatcagcaaggcacagcctatcatattcaagataaactttagtaaaaaagcggccattatgggcgctttttgctagcttcaaattatttttcaacttttttcaaaaaaagcttgtcaaattataaaactactggtaatatatttaaatgtcggcgggagctgatgaacaaatatgggtggctagctcagctggcagagcaacggactcttaatccgtgggtccagggttcgatcccctggccacccataatatgaaagatgcactgcaagaaggcggtgctttttttatgctattttacagaggattcgtatttttcgatcatgaaattacgaatcttttttattttctttcagcattcctctcgtcttaggaattaggcttttttccatggtatcataggatacataagtatcatggagggcaagatgaaacggatttattattaccaaaaaacaaccgatgatgtagtcgatagtcacgatcaaaatttcagtctacccgataattacgttattctacctaattctcttggagctagaatctggtccactaccgcttgtcacttagcatgcgcttttggttgggtggttttccgcttcttcgatcatgtaaaagtcgttggtcaagaaaaacttaagcaagtcaatgggggctattttatttatggcaaccatactagacccatgggggatgtctttacctcgctcacaatttttccaatcaaaaatttttatgctattgctaatcaagctaactggggcatccccttcattggcaaatatcttgtacgctacggcggtctgcctgttggcaaaaatatgaagcaatcgctcaaactaattaaagccattcaaactgtgattaaggataaaaagggcgagattctcatctaccctgaagctcatgtctggccctattacacgaagattcgcccgttcgatgcaacaagcatgcactttccagttaaattaaatgcgcctagtttcgtcatgaccaaaacctaccataaaaagtggcttagcaagcggcctagtgccgttatttacattgatgggcccttttacccggatacaaatttaagccgtaaggaagctcaaaataagcttcacgatgaaatttggcaggtaatgaagcagcgtgcaaaaaatagcgattatgaatattgtcaatatattcaaaagaaataaaaaataggagtttatcatgaatattcttttttgtggagatgaaaatgctcaagatggcgttttgatttccaccttatctttaatcaaaaattctggtgctcaagaattgcatctttatattttaacgatggaggcacacagtgatgaacgtaaatatcaccctttctcacaacatgcggctgattttttacgttctttagtaaaaaaagccaatcctaacagtacagttgaattaattgactgcaccaagttatttgaacaggaaccgccaaccgctaacatgaatactcgcttcacgccatatgctatgttgcgtttatttgcagaccaattgccacagattcctgatcgcattctttatttagacgatgacattgtcattcgcggtgatattacaactttttacaatgaggatattaccggaatcgaattagtgggcgtacttgattattggggccgcttcttcttccacaatcttaagaccaagcgcgcatttgattatcttaattctggcgttttgttgctgaatatgaagaaaattaagcaaactgatctctttgccgaggtgcggcatatgatgcaggttaagcaaatgtttttgcccgaccaatcagcaataaacaagctagctgtagccaagcgagtagcaccacgccgttataatgagcaatatcatttgcaaaaaaacaccaaaattcaacatttcactactagctttaggttttggccttatttccatactcaaacagttaagccatgggatgttgatcgcgtacacagtgtacttcatttacatgaatatgatgatttgcttaacgaatatctcaaattacgaaataatttaaaaaaataatttaggaggatcttattttgaaaaccattcctgttttttacacaattagcgataattatacgccatatgcatatgtttcaattaaatcattaattgaccatactgaccccaagaaggactatacgattacccttttagtccaacagatatctgatgagcacaaaaagagcttagaagatctttcaactgataatattcatgttcaaatctttcatattgacgatgacatggttaagccaattcacaatactaaggaaaactacttgcgtgctcaattctttactatgtcaattttttaccgactattcattccagaattgttccctcaatatgacaaggcagtttatcttgatgcagatactattatctgtactgatattgctaaaatgtatgaaattgatatcgccgacaacatgtttgcttcatgtcccgacttatcaattcgttacatgccacttttacaaaagtacattaaagaatgtcagggaatttttcctgcagaaaaatacatcaataatggtgtaattctgtttaatatgaaggcctttagagacaaaaagtttgttgataaattctattacttaatgaataaatatcatttcgataacgttgaccctgatcaagcctacatgaatgaaatttgcgaagataagatttatcacctacctaaagaatgggatgctatgccaaatgaaagcattcctgaaattcaagatcctaagatcgtgcactacaatcttttcttcaaaccatggcattttgctgatgttcaatatggtcattatttctggtatgttgctaaaactacgccgtattacgatgaactaaagcagcaattagacaactttactgatgaagaccgtcaaaaggcccgagctaacctagaatggatggccaaaaaagttgacatgattgtcaaagagccaaatacctgggctaaggttaaacaaacggaatcagttaaaatctaagaaaggtaattttatgacaattcctattttttacagtatcagcgatgactttaccaaatacgctgctgtttctcttaattctttagtcaaacatacagatccaaataaggattatactgtttactttttaaatcaagatctctcatcaaagcatcaaaaagctttgtctgatcttagcagttcaaacgttcatgtgaagtttttccatattgatgatcaacttgtacaacctattcaaaatcgtaaggaaaactttcttcgcgctgacttttttaccatgtcgattttttatcgcctctttattccagaactttttcccgaatatgataaggtgatctatattgatagcgacacaattgtaaacgacgatcttgctaaactatacaactccgaattgggtgataatttatttgctgcttgcaccgactcctcaattcaatatgtagacaagatgataaaatacatcaaaaatgtcctggcacttgaccccaagaaatacattaactctggcatgctcgtcatgaatgctagggcctttcgcgctgaacattttattgaccattttatgacacttttagaaaagtatcattttgattgtattgctcctgatcaagactatttaaatgaaatcggggaaggcagaattttgcacttaaatcctcgctgggatgctatgccaaatgaaaacactgaacctttaactaatcctggtctgattcactataatcttttctttaagccatggcattttgctaatgtccaatatgcacagtacttctgggatagtgccaaacaaacgcagtttttcgatgaattaaagaacgaactcaataattatactgatgacgagcgtgcagcagaccgcgaaaaattggatcatatgcttgctaaggaagacaaaactgagcaagatcctaataattgggcaaaagttaagaaacgagaggcagtaacactatgatttttggcgataatcgtgaggcagtgattaaaaatataaaaaaagctgctaatgaacgtaacttcacagcaaaagtagaaatcggcgatccccaaatgtccctagatcagcgccttaaattggtcaatgattattggaataagcgtaacactttttcaagtaagcttaataatcgtattggacatctcttatttggtactttatccagagcattagctggatcaactgaatttgtaggtttagagaacctaaataatttacctattggtggcgcaattttaacttctaaccactacaatcaggttgattctttaccaatgaagctgctcgctaacaagatgcaccatcagctttcaattgtaattgaagatactaacctaatgctaccgggatttttccgctatttaatgaattatgttggcactattccactagttcagagtcctagctatattggaaatgaatttcctaagcacctcagtgcagctttagctaaaaataattgggttttaatttatccagaacaggagatgtggtggaattatcgcaagcctcgcaaattacaacgtggtgcctattattttgcggctaaacaaaatgtaccggtagtctccacttttgtcgagattaaggatctacctaaaatcgaaaagaaagatcctaatttttatgagaccaaatatattgtccatgttttaccaccaatcttccctgacgtttctctaaacgccaacgaaaacgctcataagatgatggaactcgactaccgacaaaaagttgctgcctacgagaaaatttatggtaaaaagcttaattatgactttctagattgggatattgctgggtggcgtggtcatctttcataagaaaagcataagactccttcgtatctcttgctataaggtgacaaagtgttaccattaatatatcaagatcttattagaaaggagcttcttatatgagaaaatttactaaagaaactctatcaaattacaatggtaaaaatggacgtccagcttatattgcatttaatggtactgtctatgacgtaactaataatacccactggcttaatggcgaaaataatggtatccatgctggctgtgatgttagtttggacctcgctcaatctccagttctggaattggcccacattaatcaagttggtatttacaactaaagataaactaaaaatttgatcaaaatgaatccataaaacaacgagagaattgctcgttgtttttttgtctaactcagcattttatacgctgagttaattatttgattcaactacagtctttaattactgatgattacatttttctaatacgagtgcttatctgacatcacaccaactgattgtttgtatgaattacttggtaacatgaatatttttgatctataaatcataagagtaccagtcaggttgttgctctttaaaccccattcttgtaaacatttttttgctttgaatattaaagtcatatatgtgagccttcacttgcgtcattttctgaattcttgcaagctgcaccaatttgtcgacacattttctaccaagatgcaagttttgatattctttgcaaatcacgattgatatctcaccgtcttttagcaaagtacaatcaccaatcaatttcccttgatattgaatatagtagcaccacccatgcactgacaaatattcatacattcgacgtaatttagttaaatcataaacggtatcaatattatctacctgcttacagattttaggatcctggtaccatttaagagtctgcttttcattcgggaaatatggcactaacgtaagtctatcagaatttttatccatctaaatatgtccttttttctaagtatttaatgtctgaaatttaacatatacttttgaatatttaccagtctaatagagagacaaagacaacaagtttatacatttcataacgcaaataaaaagctataacttctttattagctctataatttttcctgttgatgaatatttatgatattctgtctcaattaagctatttaggagttgtgctatgtcctctgttaatgattgtattaaatttgatctcgatattaaagataaaaatatcgttttttacaacaatttctataaattcttcaatggagtgcaatacaaagtctacgaagcccttttaaagcagcccacttgtccattctgtggctttccggcagaaaaaataacgtatccatcaataccattcagagtacaaactcctcaaagttccttggaaaccctatttaaaaaaatttcaagacttagaaaagcttaattatagaactttaatagcacacaaaaaggcggaagcctctggcccccgcctctttcatattccgctagctccggctgtcagactcgaactgacgacatcttgattaacagtcaagcgctctaccaactgagctaagccggaatattaaaaaagagcacggcagcttcctttcctcgcaggcagttgcccaccaactactttcggcgttaagaagcttaacttctgtgttcggcatgggaacaggtgtatccttcttgctttcgccaccgtactcttttgagcttttacactcaaaactaaacataatccttctcgcaaaaaaccttccagtttgcttcgctttggtcaagtcctcgactgattagtactggtccgctccatccttcacaggacttccactcccagcctatctacctcatcgtctctgaggtgtcttactgcttacgcaaaggaaatctcatcttgaggggggcttcgcacttagatgctttcagcgcttatcccttccgcacatagctacccagcgatgctcctggcggaacaactggtacaccagcggtgcgtccatcccggtcctctcgtactaaggacagctcctctcaaatttcctacgcccacgacggatagggaccgaactgtctcacgacgttctgaacccagctcgcgtgccgctttaatgggcgaacagcccaacccttgggaccgacttcagccccaggatgcgacgagccgacatcgaggtgccaaacctccccgtcgatgtgaactcttgggggagataagcctgttatccccagggtagcttttatccgttgagtgatggcccttccatacggtaccaccagatcactaagtcctagtttcctacctgctcgagttgtctctctcgcagtcaagctcccttatacctttacactctgcgaatgatttccaaccattctgagggaacctttgagcgcctccgttacactttaggaggcgaccgccccagtcaaactgcccacctgacactgtccctggcctggcttacaggtcgaggttagagcatccttcaaacaagggtagtatcccaacattgcctccaataagactagcgtcctatcttctctggctcctacctatcctgtacatgtttaaaagatactcaatatcaagctacagtgaagctccatggggtctttccgtcctgtcgcgggtaacccgcatcttcacgggtattataatttcaccgagtctctcgttgagacagtgcccaaatcattacacctttcgtgcaggtcggaacttacccgacaaggaatttcgctaccttaggaccgttatagttacggccgccgtttactggggcttcaattcaaaccttcgcttacgctaagctctcctcttaaccttccagcaccgggcaggtgtcagcctctatacgtcatcttacgattttgcagagacctgtgtttttgataaacagttgtttgggcctattcactgcggctaaccaatctcttggctagcaccccttcttccgaagttacggggtcattttgccgagttccttaacgagagttctctcgctcaccttagtgttctccactcgactacctgtgtcggtttgcggtacgggtatgtcatctctggctagaagcttttcttggcagtgtgattaccacaccttcgctacttttaattcactcctcttcacaactcgtgttgctggttagaagcatttgactcttaaccgcacttgttgcttgaacatcgttccatcgcgatgcgtgcttcacctcctgcgtccctccttcgctcttaacgatttgacacagtacaggaatctctacctgttatccatcgactacgcctctcggccttgccttaggtcccgacttaccctgggcggacgagcctgccccaggaaaccttagtctttcggcggataggattctcacctatctttcgctactcataccggcattctcacttctaagcgctccattgatcctctcgattcaacttctccgctcttagaacgctctcctaccacgtgctctttaaaacacatccacagtttcggtactatgcttagccccggtaaattttcggcgcagcgccactcgactagtgagctattacgcactctttgaatgatggctgcttctgagccaacgtcctagttgtctacgcaactccacatccttttccacttagcatagatttggggaccttaactggtgatctgggctgtttccctttcgactacggatcttatcactcgcagtctgactcccgtgtatggatatctggaattcgtagtttatctggattcagtaacccctgacgggcccctagtccaaacagagctctacctccattatcctctccacgaggctagccctaaagctatttcggagagaaccagctatctccaagttcgtttggaatttcaccgctacccacaactcatccccgcaatttttaacttacgtgggttcggccctccagtgcgttttaccacaccttcagcctggtcatgggtaggtcacttggtttcgggtctacgtcacctaacttttcgccctattaagactcgctttcgctccggctccgtcttttctgacttaacctcgctagataacgtaactcgccggttcattctacaaaaggcacgccattgcactttaatgtgctttgactacttgtagacacacggtttcaggttctttttcactccccttccggggttcttttcacctttccctcacggtactggttcactatcggtcactaactagtatttagccttgcgagatggtcctcgcggtttcaaccgggattcctcgtgtcccggcctactcaggattctgctaggcgtgcttgagatttcgcttacggggctctcaccctctctggcttaccttcccagataattcaactatctcttacactgccacgtcgcagtcctacaaccccaaatgataaatcacttggtttgggctctttcctcttcgctcgccgctactaaggaaatcgatctttctttctcttcctgcagctacttagatgtttcagttcactgcgtcttcctttgattagctatctattcactaatcaataatgcatctctgcattgggttcccccattcggatatctccggatcactgcgtacttaccgctccccgaagcttttcgtagttcgtcacgtccttcttcggctgttagtgcctaggcattcaccgtgcgcccttttctgcttgaccttactcaagaattctcttctcggtcgctctacaatctgttctctttgattgtctcggttttttgcttggattatattcagttttcaatgtactagctctttgatcctttttctggatcaatggaggctaacgggttcgaaccgatgacctcctgcgtgcaaagcaggtgctctcccaactgagctaagcccccagagtattttattttcggccagacataactttaactctttttcttcgttatgtcaatgggcctaaatggacttgaaccatcgacctcacgcttatcaggcgtgcgctctaaaccagctgagctataggcccgactaacgcttggcgtttttcaaatctttgaggtactaccctcaaaactaaacaaagtttctcagtgtgcttccgcttgctctggatacttctcttagcattcctgctctccatatccttcgcttccttagaaaggaggtgatccagccgcaggttctcctacggctaccttgttacgacttcaccccagtcatctgccctgccttagacggctccttcccgaaggttaggccaccggctttgggcattgcagactcccatggtgtgacgggcggtgtgtacaaggcccgggaacgtattcaccgcggcgtgctgatccgcgattactagcgattccagcttcgtgcagtcgagttgcagactgcagtccgaactgagaacagctttcagagattcgcttgccttcgcaggctcgcttctcgttgtactgcccattgtagcacgtgtgtagcccaggtcataaggggcatgatgacttgacgtcatccccaccttcctccggtttgtcaccggcagtctcattagagtgcccaacttaatgctggcaactaataacaagggttgcgctcgttgcgggacttaacccaacatctcacgacacgagctgacgacagccatgcaccacctgtcttagcgtccccgaagggaactttgtatctctacaaatggcactagatgtcaagacctggtaaggttcttcgcgttgcttcgaattaaaccacatgctccaccgcttgtgcgggcccccgtcaattcctttgagtttcaaccttgcggtcgtactccccaggcggagtgcttaatgcgttagctgcagcactgagaggcggaaacctcccaacacttagcactcatcgtttacggcatggactaccagggtatctaatcctgttcgctacccatgctttcgagcctcagcgtcagttgcagaccagagagccgccttcgccactggtgttcttccatatatctacgcattccaccgctacacatggagttccactctcctcttctgcactcaagaaaaacagtttccgatgcagttcctcggttaagccgagggctttcacatcagacttattcttccgcctgcgctcgctttacgcccaataaatccggacaacgcttgccacctacgtattaccgcggctgctggcacgtagttagccgtgactttctggttgattaccgtcaaataaaggccagttactacctctatccttcttcaccaacaacagagctttacgatccgaaaaccttcttcactcacgcggcgttgctccatcagacttgcgtccattgtggaagattccctactgctgcctcccgtaggagtttgggccgtgtctcagtcccaatgtggccgatcagtctctcaactcggctatgcatcatcgccttggtaagcctttaccttaccaactagctaatgcaccgcggggccatcccatagcgacagcttacgccgccttttaaaagctgatcatgcgatctgctttcttatccggtattagcacctgtttccaagtggtatcccagactatggggcaggttccccacgtgttactcacccatccgccgctcgctttcctaacgtcattaccgaggtaaatctgttagttccgctcgctcgacttgcatgtattaggcacgccgccagcgttcgtcctgagccaggatcaaactctcattttaaaaagtttgaatgattgctcattccttatttaagatctttgtctcaaatttattgcttgcgaattgacttcgcttcttgtttgggtttttacacccgcacacttttagcgaaactttgttcagttttcaaagtactacctctgtcttgctttttttgcaaagcagacagcttttatattttatcaaaccatcatttctttgtcaagaacttttttgatttgttttttcgtcttactcaagctttttctgctttcacctgacgacatttaaatatattaccagcttatttacttctttgcaagtacttttttctttttatttgttttctttccttgcatgtctgtttttaagctctcgtcgcatctctcgaagcgactttattaatgtataatacttgaatattaattgcaagtattttttcaataaagaattatgctcgctcttaaaaaggcgacttcaataatataccttaaaattcattttttgacaagcttatttttaaatgaatatttacaaaattcatgttaaagttgatacatcactactttgaggaggtcattaaaattaaaaaatttgatttaactattatcggtggcggacctgttggcctatttgccgcgcgatttgcccatcttcatggactcaagaccgtactgtttgattcattatctgaaacaggcggacagccacaaatgctttatccttttaagaaaatcaaagatattcctgcttacgactctattacaggaactgaactaatcgacaatttacgacataatttaacggatacaactatttttactaaccataaagttgaaaatgtcactaaacaaaaagacggctttattatcgatgatatagttgcatcccgcagcatattgattaccactggtgccggtgcctttaaacctaaagctttaccattatctatggatgatgatactcaaaaaaggattcattactttattaaagatcccccaaaatttgtcggacaaacagttggcgtctttggtggcggcgattcagcattagacctggcactagaattagctaattatgccaatgtcaaaatcattcatcgccgtaatcaatttcgcggtcttgaatctaatgtcaaaaaacttaagtctttaaaaaatgttgaaattttaactccttatcttcctaaacaaatcaatttggttgataatcaactgaacgttaatttaaaagaaatgggaaaagatagcttaactaatatcaagttagaccaagcagtcgttgcatatggctttaaagctaataatcgctttgtcaaaaaatggggaatcgatttagctggcgcacaaattaaggtgaattcaacaatgcaaactaatatcgccggtgtttatgcagctggcgatgttgttacctatcttggacgcgtccctttaatcgctctcggttttggcgaagcccagattgcaatcaccgcgattatgcgtgatcttttccctgaaaaaactttgacaattcattcaactagtttttaggagttccagatgagtttaatcgattttattttgcacattgatgaccatttaatcccgattgttaaccaattcggtggttggtcctatttaatcttattcgctatcatttttattgaaacaggcttagtcgtttttccatttcttccaggcgattcgttgatttttgctgcgagtgcaatggctgctaatcctaagtatggcttaaatatttggctagtttatcttatagtagcattcgccgccataatcggtgacagtatcaactatgaaattggtgcctggtcaaccagagctggtgaaaaacatagctggttcaataaattaattaatcaaaataatcggttggccgctgaaaagttctttgagcgccacggaccaattacgatcgttataggtagatttataccatttattcgtacttttgtcccattcatttccggcggcagtaagatgcattatggtaaatttatcacctacaacatcttgggtggcttgctttggacaggattgttcacaatcatcggtttcttctttggcaatattccatttgtaaaggaccatttttcaatgatcgtaattgctatcattttagtatcagttgtgccaatcgcaattgtcgcaatcaagaaaaaaaatatcactcaaaaaagagttccactaaggaactcttttttacttacgtaataatttttcagcaaaatataattcataaataaccccagcaacggcaaaacaagaagcaaagaagccttccgttagcacattgataattgggtcagtattaggatcaaacagccaatcactattgttaaacaaaatatggtgaaaaatcacaaagaaactgtcgaaattggttactgcaaatggaaaaataataattggcaataatagcaaaataagggctactgatttatccaaattaagcagtagctttttcttttgtcgtttaaaaacaaagtgcactatgatgcagataataaaaactaatagagtcagaataaataaatgcttacattccgcaaaatgttctgccgcattagcagatgtagggaaattatccatttaagctgctttttaaagggccagagcaaataaaacatcagctggttataattatgcattaccttaaacaaagacatgtgaaccgtctcatatgtcttttgtacgatcataaaaataaacaataatggccaactagccacaattgccccaattacactgctagaaacagcaaacaaaaaatgataaatcagcgaaaaaatattgtttttagtaatcataattcaaattcatctaggttattaactaaaattgttggttgacgtttatctgcaatatccacttggtcgtcacacctgtcaaagtcaacaactgatctactccactattaaagccagctttaatatcggtatcgtaattatcacctaccaaaagtgcctcatctttgctatagccaactttatccaaagccatttttacaataattgattcaggcttaccaatatacagtggctctactccacttgctgcagcaacgaatgcacattgtgaaccattgcctggaattagctcatcctctgctggtaaattcatatcggcattagtcccaataaaagtggctccacgtctaatcgcccgtgaagctactcgtactttatgataagtcagatctgtatccataccgacaattacataatcgggattttcttcattaagctcaaactctggatgttgcaataattcatgccagagaccaatctgcccaataatatacaagccgatcttttccttgtgttctctttgtaaaatatagctagctgtggccatacttggcgtataaacatggtccgtatcagtttcgataccgtgtccctttagtttatcaactacccatttgcggtgttctggtcgtattgttggttaaaaacaaatagtctttccctgcttgaaccaaacgatgaacaaatcttactcctgattcaactgtttccttaccacgataaacagttccgtctaagtcaattaaaaatacccggtaatctttcactagtttccctttctctttttaataataaatgaatgatgccgtccaaattcttttttcactgcaattgattgtttttttcttaaatttagtttgatgaacacgccgcttcttaaacggattattttcatttttattcttccgataatttcgacgtcgtgcatgataacgctcatttttaccaaaatcgcgctcgcgtcgttcacgtgatcgccgtattttagtacgttgatgctgataataatgtactggatgcgttaattccaagataaaataaggtccgccgggattacaatattccgttaaataatccacgatcgccatttcttttttatcaattgcggttctagcaccgtctttataaaagcctttcaagcgtaaatgttcactagaaacgtccccaccagataatcatactggtcaagataaggatcatattttttacgcaaagattctaaatcaagtgcgtctcgctcattgacaatgatgctataaagctgcgcaccaatcttaatgctcttaccatcttgcaccacgtcagcaagtgggtgtctaattggctgttcttgttcaaatttattttcttcagtcatctttttcacttctcgctgttaaaggatatttttcagccaaatatttaccaacaacttcacgtaaaaattgtgggaataaaaactcattttcaccgacaatagccaaagttggaaaaatggaactaagacataatgatccaaacaggcaattttatattctttttgtggatcaatttcatgcccattgacgtaaactacacgtctacgcatatcaaccttgatccctttgtaatacatctgaccaaaaatttttcctcgaaaactcatcccttgcagtggaaaatggtctaggtaatgccgattcttttcaatttccatcactagtcgccacaaatcataacctttcaaggttgaacgaacaacgtgcattggatgcggtaaggcattttgtaaatcatattgagtaattattccactcttaaacggggcaagaataggcctgagcttaaatggctaaatctgttttagcaaaatcagcaatcgcatcaagagaaacttgaacggctgctactttatcatccgcaaatttttcaggtaaattagccacttttcgttctgataaaagtcgcttaccttcatcatagtagccctgaatcactgccttatcttccggttcttctggcatcgaagcagtagaaatagtgcgaggtactaccttaatcacgtgatgatcttcaagttctagatgaatatcacccacatagttccccatttacctgtttgcgtaatccaagtatgccccactttttcaccatgttcaatcagatcatggctgtggcctcctacaattaaattaatttgaggataatgtttagctaaccagcgatccatttttaatccaacatgagtcaataaaattaagacatcatactttccttcaatttgagctaattcgtgatccatactgtcacctaacatcttgacatgccaatgattaggaccataagtcattggataagctgcagtcaggccaattaaagcaattcgcgtctttttcttagtagttaaaaacatatggccgactgcccatttaggcattgattcatcttcttcacgcaaatttgctaaaactgtcggaaagtccgcatgatcaaataaatgttccaatacccaatgtggattagaaattccctcattattgccaatcgtaattgcatcatagttaaacccattcatcaatttgatgttggcttgaccttccgtagcatcagttaaaggatgagaccgatccataaagtctcctgcatcaaaagtgtagataccatcaaccgattgatcagcctgcgcttttttcaagtaacgtccgattttagggaaatgttcaaaatgtgaatgaagatcattggtatgtaaaattcgcagttgttccattttttatgccactttctaaccaattcgattggcttttaagatcatattatatgcgtctaaaatttttcccttaggtttatcccattctacccattttggatttttccaatcactttcattagtcaaagtctgcaagtcataagtatcattgatatatttttcataagcaatcagtgccttagttcgaggaatattcagctgcagtattttgacttttttaattaagccatgatctgcagctaattctgcaattccattttggtcaatattagagatttcataatatcgactgccatcatttctggtaacttcttcaattaagtccaattgttccattaaatctcatcctttagatttcaatcataccgattactgataaaagaatagtactataaatagaaaaaaatgtgtaaccatgctattgttaagtatgcgatagaggtgtacacatgaaatttaaaagccgactcgtttgggttctttttttagcttagtctttttcataaatagtggttttacagttgtagggcaccgtggtgatcccatcaaatatcctgaagaaacaattcaggctgacgattccgccttaattctggtgctgattacgttgaactcgatctccagctctcaaaggatggagttccggtcattgcacatgatgatgacctcttccgagttactcatacacatgcaattgtatcacaaaataattttacagcacttaaacaactgcaatatgacaatggcgaacacgttatgtcactcagtgagctttttaagcattatcaaaataaaccaaacactaaatttgtcttagagactaaaattgatcatggattaaatccgtcctatgagttagaggataaaatcgcacaaatagttaaaaaataccatatgcagaaaagaatcatgattcattcattttccgctgctagtctctttcactttagaaaaattatgcctgaagcttatctaattttgatcgttggtagcctgaaacgcattaatttcagtaatttacctcaagttaatgctatcaatgcttcttctgacattgtgcaagagcatccctttttaattcactggcttcacaaattacataagcaactgtttgtctgggccgaaatggacgaatcgcctgccctatggcattggctaattaatcggaatgttgatggcgtggttaccaactatcattcccgctactgttttaaatataaattagccaaaagtggcactaaaaagtacgctattaatagaactggaatttattttggtaaaactaaagccgctacaatgatgaatccgtatgttcgcatcaaagaaaagaagtacgtgcaaccaggtcaaaaagtcaatgtcacttatggcgtccgtgtagatgatcgcttattttatcaaattgctgaaaaaacttttatttcggcagaattcgttaattttgacttaacaaagcgagatattgctccttatcaaaataagaaaattatcgctaaacctaaccaaaaagttacaatttatcgttatcctgataaccaagccaaaacgcagcaaaaattacccgcaaatcaattattaaaaattcaaaattttaatggtagtcctaaaaacatgtggatttataccaaactaggttgggttaaggcaaaagatatcttgttctatggcttctttagtcaagacgatttcagagattatcagtccttaccacgggtcagtcagtacactaatctcgtgcttttgccctataatcctaatcaagcaattgcaccaaccacttttacacaaaagcttcaacagattaacaaaattatctactaaaacaaaaagaccagtaaactggtcttttttgcttcacttaattattgatttaaagtactttgctttttaactaattcatatggcaaaacaatatgagtatcatctacttcttcattgttcatcaacttagtcaacattctcattgctacggcacccatatcataaagtggctgcttaatcgtagtcaaagctggacgaacaacagaagctaactgcgtagcactggcggtcacgatttccaaatcttctggcactttctaccttcttttgtaattcattcaaagcttggtcgatatgatcagccatttgtttttgtcccttattaacagcaattccgtaaggagcattactatagacgccgccgactaacttataaccaggattttcttgagcgataccggcaagcaagccgttgtcagtagttaatgccacaccttggttagccttcaatgcagacattgcttgaccatagtcatcatattgcaaaatccgcgctttaggggcatacttatgtacatcatcaactgcggtagttcctttaacggccaaaacagttttgccttccagatccttaacattcttgatcttactattattaggcactaacaaagatgaaccggctggaaagtatggcttagagaaggttacttgcttggcacgttctggtgtaatagtcattgtggctaaaacagcatcaacatttccattttttaaaagtgggattctagtgttggcagtagtagtaacaaaatcggttttagcatctttacctagcatttgcttagttaaagccttagccaaatcgatttcaaacccttcaatatgtcctgtcttaatgttcgttaagccaaacaatctagtatctgctctaacgccccaaacaattgtcttactttcttttactttttgataaacattattgctagcatgcttgccacaagcagtcaaggcaagtgccaagattagcaataagggaaagaaaaaaaatctttttaattttttcatggcgtgccaccttaatctttagaaatgatcttgcttaagaattgacgtgcacgttcagtatctggatgagcaaagaattcttctggcttgcgatcttctaaaatatgacctttatcaaagaaaattaagcgattgcttacttctctagcaaaacccatttcgtgggtaaccacaaccatagtaatgccttgttcagcaacatatctcataacttctaaaacatcttcaatcatttctgggtcaagggcactagttggttcatcaaataaaatcaccttagggtgcattgctaatgatctagcaatcgctactctttgtttttgtccaccagataattgatgaggataagagtcaattttatcggccatacctactttttcaagatattgcatcgctactttacggttctcatcatcaggacgctttagcacaatcttaggcgccagcataacgttctctaacacagtgtgattattgtagagattaaagtgttggaataccatcccaacatttttacgaatcttattaatatcggtctttttatcagccaaatcatacccagttacaattaattgaccgctattaattggttccaagccattcatagttctaattaaagtactcttacctgaaccagatggaccaataattgaaaccacttggccttcatcaatctttaagttaatatctttcaatgcatggagctttccatagtacttatcaacatgcttaaattcaataattgctgtcatggcttctacctttctttcctttgtctacacaatataattattttactcttcttaaagctaaaactaaatattttagcaattcaaaatagtataatagcctgctaatcttataaatttgttcggttttagcaaaatatatttgtatttagctagattaaaataatcatattaacgctacttacgaatttattaactactaactttcaggataaagaaaaagcccatcatcccctctagtttgggacgaaaggcttttttccgcggtaccacccacattgtctaagtatagaccaactcatgaagcaccgacatgcttcaccggcgtggtaacgtaccggagacgtctcgacctactataagaattgttagttcggtgagctgctaaaagtgtttttcaatagttcagggtctgctggcttttcactaacaccaactcactgctaagaataaactacctactcgtctttttcatagccttttaatttatttatatgtatttaacattatttttcaagaaaatgcaagggaaaataatttaaatcgcaaatgtatccgtttttaattaaaataaatgctgttaatattcggaaaatagcttagaatattagtgatacctagaaaattaaaggagtttgatatgggaaagcttgaaaaacccgttattattggaattgctggtggttctggtagtgtgaaaacaacaatcgcacacgaaattgccgataacatcgatgatcaagatcgaattatgatcatgacgcaggattcttactacaaagacaatactggcgtatcaatggaagaaagaatgaagatcaactacgatcatcctgatgctttcgatatgccactacttgaggcacaattaaatcaattgatgcacagaaagccaattgaaatgccaacttatgacttcactgctcatcccgtagtgatgaaactattcacgtcgaaccagctgatatcattattctagaaggaattttggtactctttaacgaagatatccgcaatttaatggacatcaaggtttacgttgatactgatgatgatatccgttttattcgtcgacttgaacgtgatatgaaagaacgcggccgctcacttgattcagttattaatcaatacttgggcacggttaagccaatgtacaatcaatttattgaaccaaccaagcgttacgccgacatcatcgttcctgaaggcggcgaaaacgatgtggctatcgatatgttaactactaagttgcaatcagttttaagtgaataattatcgagatataacaaacaggcaagctaggaataatacctaacttgcctattttaatactctaaattatcttagtttttcttatcatcctgtgcattagctgcatccaaaatacggttatatttcttagcaaagaataccaaaagcaaaacactggcaataacataaataaccgctgcaatgtagtaagcattagcataaccatcttgcgtattaaacaagtaaaattcagtgaagagaccatcaataactccaacgatagcataggcaatttgaactacaccagtaaaggctggacgcaagtccttgtcaacaataaccatctgaacttcttgctgaatcggcatcgtggcattggctaaacctgttctcaagaaaagcagaattgcgacaatgacgaataagaaggctccgctacctaaccggcgaccattagctaacaaaagcataaccggtacacaagttaatgtacctgcagcaaccgacacgattgcaccgagtttcttttccaaaaatggagcaaagaagtaaccaattagcattgctgcttgaacaaaagtgttgatggtagaagtaacatcacgtggaatgtgcaaataactattcaaataaattggcacataaacggcaactaaacgagcaccaagttggataccggcaatataaacaatccacatcaatgtcttcttgctcaaaagcttcttatacatggccaccttttcaactctgctaggttctttatcatctgcagtagaacgatagtcacgtggtacatcgtgaataaatagggctaagataaaggctaacatcgttacagcagctgtaatataaagtaaaattctgtatgaatttgtatagtcagctaaagtttggccggttaacatttcagaattacctgatagaactgaagcttcgtgataaggaatccctctaattaagccaaagaaccaaacaacagccttcccacctaagaaagtacaaattgtctgcgtaatcaagttaacaatcataacggttgagaacatcttagttctaatcttccctggaacatatgaagtccacatcagtggatacatcaaatcataaaccccaattgctgtccaagaaatagtataagcgatcatgatgataatttgattggttgtgatacaggttaaggccataaaaattgccgtcattggtggcaagatcagcaaaatctttcgatagccccatttatgaaccgtcgcaatcatgactgacatcaaaattgctgtcgccgcattaaaaatgtttaaacctgaaatcaagtgtggcgctacaatcttgtagtaagacaaggctgcatcattcgtaatccctgttactgcacctaaaataccataaatccataagtagacaatgacattgtgtttataacgtggattccaatttttaatcgcctcatcctcagcttccttttccgcattgcttcgtcgagccatataagtccccttccccttttatgaaaacgtatacaaatatctaatttaatcttagcacctatatagtattaataaagtgtgtgtatacgaaaaggtattgattatatgacttaggcaagccttggctttaatgctttatcaaatagattagtaatcaattttactagtacaccatcaaatactaatgatgaaatcatgctgacaataaacatcaaaatttggacattaatttgatagtgactccaaccaaataagaagtagctgggaataaagccacccaaattagcaaaaaaggcaccggtcaagacacttttccaagagaatctttcataacgttcctttttagggaaaaagccaatttcattcattgccccctgaattaatccttcaaaaattgtcaaagctccccattgtccgccgatcgccatttctacagtcgcagccaataattcaccgattgttcctgcacccttagtcggtacaaaatacattgctagtggtgccgccatgtaccataatcctgtaaaaatattatccactactggtgcataacccgtgggcaaaaaactcaatttcaccaagttatacacattattaaaaccataagtgtaaatcacgcccatgattattccaattaaagccactaaaataattgactttacattccattttgacgatctagtaaacataaaaatgctccttactaacatactgtcagtaggagcacacaaataaaagttaattctcttgttagcactttcccttgcgcaagtattatcttgttcaggttcgaagggtattatctcagcattacgcacccctagtgacatttcatttatttatcaattaagtcaagtatagcacattgttaatcaaatgccatttgatctgtgtaaagtttgtaataaaatcccttttctttaagcagtgcctcgtggctgccttcttcgatcacattaccatcttttaacacaacaatcttattagaattcaagatcgtctttaaccggtgagcaatcacaaagcttgttcgtccagcaatcacagtatccattgccttttgaatcttttcttctgttaccgtatctacgttagaagttgcttcatccaagattaggaatggtggattcgttaaaattgtccgagcaattgacattaattgcttttgtccagttgaaaagattgagctagcatcgctaacttgagtatcgtaaccatcaggcaaagtctcaataaaatcatggatattagcctgcttagccgctgagatcacttcatccattgaagcattcggcttaccataacgaatattgtccgctacagtaccagtaaataagacagagtcctgcaggacgatcccaacattatttcgcaatgatgttagttgaatatcacgtacatctgtcccatcaaaggttactttacctgaattaacatcatagaagcgatttaacaggttcataatcgtagttttacctgaaccggttggtccgaccagagccactgattggcccttatcaaccgaaatatttactccgtgcaaaatttctttatctttattgtagccaaaatgaacattttctagcttgacaccatgattcaaaccactaatgaccttaccatttggcacttcgttttcatctttttgttcttcaactgtagctaatcttcttgccccagttaaagctaattgaatcatggaataaattgaagtaatttgcgtcaaaggttggaaataaacttgtgaatattcaacgaaagttacaatcaagcccaatccaatagcctgagaaatttgaccggaaataatcatccaagaccccatagcgatgacaattgccaaattaagtaagttcaatccgttcatcaatgggaataggattcccgaataaaattgccccttaaacaaagcgattcttactttattgttgtagaccttgaagccatcaaccgattcttgacgcaaaccattggtaataatcaccttttcaccattgatctgttcggtaatataaccatttaaatcgccaatttcatcttgctgcttatcgatataaacgcgagcttttttcattaaaaggacactaataatcaaaatgaatggtgttgtcgcaatcgtagtccaagccaaagtactattaatcgtgaacatcacaataattgttcccacgaacataattccctgggaaataatttcaaaaatcgcattgttcattgcgttgaaaatattatcccaatcggaagtaagtagcgataaaagtttaccatcctgatgagtatcaaagtagcgcactaacatccgttgaaacttggcaaatagattctcacgcatgtcattagttgaatccgcattgaacttggacattaccatccaagcaataaaaatcgctatctggctcaataagtaaaacaagaacatcgaccataacgcgctatagaacgtgttcatggatgctgtacccttttttaaatcaaccaaataagtagttaaagcagtaactgaacggcctaaatatgtaggtgccataacctgtgcaccactcgaaatcagagaaaggataactacaatagtgattcccttccaataaggcttcaaatacttagcaaaatagcgcaatgcctttttcgtattactcatttattcatttcctcctttcttacctttttgtgtcttgaagatttcttggtaaaccagcgaagtcttaagcaattcttcatgcgtaccttgtgccactaatttaccgtcatctaacactaaaattgtatcggcattaatcactgaaacaatcttttccgcaataataaaagtagtagtatcaggcagctcatgctctaaagcttgctgtactttcttctcactttccgcatccagagcagaagttgaatcgtccaaaattaaaattggtgctttagcaatcaagccacgtgcaatagatagacgttgcttttgcccaccggaaaagttagcagaacgctcctctacttcatgatcgaaagaatcgttataacgctcaataaattctgatgcttgcgccatattggcagcacgctgcaattcatgtaatttagcctgagcattaccttgacgcaaattagatgctattgtacctgagaaaagaactgctcgctgcaacacaaaagaaacagttttgcgtaatgcagcttcagttacatccttaatattttgaccgccaatttttactttacccttagttggatcatataaacgagcaattaattgggccaaagttgatttaccagcacctgttgccccaacgataccaaccatttgacctggcttaatcttaaacgaaatatcctttaaagtaggatcatccccatcaggataagtaaaggaaacatgatcaaactctacgctaccgctaagaggtgcaaccgaaccactttccacaaacttgacatctggttcagtctccaatacctcacgaatacgtccaagagaaatattagctcttgaaaattgcattaaggtcattccggcaatcatgatcgtaaatagcagggttaaaacatagttcacgaatggactgactaccgcaatatcacttggatgtgccgtaatatttttaccaattaaataaacaattaaagcaattacggtataagcgatcatctgaaaagctggcataattgcagagaaccagtaaccaatcacaatgttgtagtcattcaattggtccgaagtttgatcaaactttttaatttcttgtggaccttgattaaatgacttaaccactctcacaccttgcaatgtttcttgtgcttgattagaaattcggtccatcatttcttggaatttggtaaacaaactattcatttgtcttaaaacgtaagcgccaaaaccaaaaataagtgcaaccatgaccactggtgcccaccagaagcgcggaataatcacgatacagaagataaatgaaccgacaattaaaatcggcaaccgcaacatctgcataaatagctgcatcatcatgttcattacctggttcatatcgttgatcaaccgtgtagttagagaacctgctgaaaatttcttaatattaccaaaagagaacgtttgaatcttagcataggtatcttcacgtagatcactaactactccttgtgcaattttcgctgcaaaataaacgttaaaaatacccgaaataattgcaattatacctaggactactagccagattccatcagacaagactgcttgcttctgattcgccatcaatgccttttgaatattttccaataatttaggctgatataatccagaaaacgctgaaactaagatagcaataattgcacaaacaacatcttttttataacgctttaagtatggaagaattattttaaagttttccatttttactcctttcttcacttaaaaaatgccaaaaagtagtgctccattcttctgaaagcttagctaacaatttcattttgtcagttcccatggcttgagccgttttttcctctaactcaaatagaggacgcaacctgtcataagcatatttccgccctgcttcggtaagctggcaaaatcgaactcgcttatcgctaggatcaacagtcatcgtgatatgatcatgatcacgcagaatcttaattcctttgttaatcgactgcttgggtaaatcactcagatttactaattctctttgtgtcaattttccccgaatcagtaattcatacatgattaccactaaatagtcaggcaagtcatgatcctgctcccattggctataagcacggctgccatggataattgatagatttaatttttctgtctcactaattttcattacttcaccaccatatttagtctacatgcataccaaatatattagtatgcacatggactattgtcaaatcattttgtcaaaaataagactataattaaagtaaagaaacaatttttgcatctaaatttcaaattggtataataaaaaaatcatcaagtaaaacaaggcagggattatatgcgtaaaaagtttttattaataatttcaatagtggtcctgtttgctttgccattaagtggctgtaagcaaaacaaaaagcaaaacgtttatcaagcagttaaaactagtaaaaccattaactggggcgtcaaagccgacacgccattattcggctcaataaatattaaaacaggcaaacttaatggctttgaaattgatttagctaatgcattaacccatgaaatgctaggcaaaaatgtcaaagccaatttcataacaacaacggccaacaccaagattcagcttctaaaaaacacgaatgtcgacgccgtcattgcagcaatgaccattacgcctgaacgtaaaaaacaagtcgaattcagtcacccttactttcctgctggacagtcaattatggttgctgacagtagcgccattaaaaatgctaaaaatttgaataacaagaaagtgcttgtagttaaaggaactactgccgccgatgctatccatcaagttgctcctaaagcggaaattttacaattcgatgattacggccaagcttttgccgcattaaaagctggacaaggagatgcctttgtaactgataacggaattttaactgggattttgcgtgatagttccggctataaattagttggcggcacctttaccaaccagccatatggtattgcagttaataaggggcaaaatgacatgctcaagcatatcaacactgcattagcaaaactagaaaagaatggcacatataatcacctagttaaaaaatggtttggcaacattcctggtatgaacattaaagaactagaaaagaagtaagaaaaaggctaagatcaaaattttgatcctagccttttcgcttatttagcaatgaaatcaagtaaagtaaacattacatctttatttttctcaggcacaccatgattaataatctctgtaggcgtttgatgtaaatccttattttctaaagcatatgctccatcattaatagcaatctcacgtacattatcaatttgcggttcaaagtggaactgcaacccaattacattatctcccagtaaaaagccttgattcttaactagatcactagagaataataacttagcttcggttggaatttcactcatttgttcatgccaatgaagagctgttaacttatccggaattcctgtaatagtctgatcttgcaaataaactggtgcccaacctacttccttagcgggtgcatcaagtaccttatagcccaaagttttagcaatctgctggctaccaaaacaaattcccaagatcggcttgtgttgatctaacatttgtctaatcaacacacgttcatttttgacccaatcaagatcatcattaggactgtttggactgcctaggactactaatagatctgtttcatcaacagttggcaaaataccaaaattccctggatggtaaacgaacatttcgttatctctagcatggcaccaggcttgaatagaaccaggtccctcattaggtgcatgctgtaatacattaacgcgcataaaatccctttctcactcaacaatatttttgtttttcattttatactcaattctagtggtaaacaagaagaattcagttaatcttttactatatctttagaaactatatgtcaccttatatgatataatgttatacatatttttacatctggaggacttttatggacaatcaccttaaacgcagtattggcttaggttctgcactttcaattatcgttggaaccattatcggttctggaattttctttaaacaagcttcagttttagatagcgcaggctcaacctttatggcacttttagcatggattttagctgggattatcacattaaccgccggcttaacgattgcggaaatcggtgcccagatgccttatactggtggactttacgtctatattgaaaaaatttacggccgcgttttaggttttatggctggttggatgcaggctattgtgtacggtcctgctatgatagctgcagttaccggttttttaagtattatggtgactaatctctttggcatcggcaccgaatggcgtattcccattggtttgatcactatcatcgctatcggtggtttaaactttttagaaaataaagtcggtgcagcctttgctataatcactacaattgctaagatgatccctatttttgcaattatcttctgcggcatctgctggggtgagcaaaacgctgtcgcccaaactgtgactgagctgaatcgatcaacaggtggtcttggcgtagccgttctcgctgccctttttgcctatgacggttggatctttattgctaacttaggtggcgaaattaagaatccacaaaaattattacccaaagcaatcatcattggaatcactacagtattagtaatttacgcgttaattactattggtatttttagtttcatccctgccgataaaattcatgcattaggtaaaaattcaaccacttatttggctgacgctattcttggtccaattggcggtaaagttctatctgtcggcattattatctcaatgctaggcactctcaatggagaaatgctcacctttcctcgtattatttacgctatggctaagcgcggggatttgcctttctcaagatttttatcatacgttacacctaagggaaaagcaccagtcattgccactatgctcttaattaccttaactggaattatgatgactttcttcgatcctgattacctatcaaatctctgcgtcttcacaatttatagtttctatgttttagcattctttggcttattcattttaagatacaaaaataaggaccaacgtcctttcagcgtaccgttttatcccctaattcctttagtagcaattgcgggcgggctcttcgttttagtcagccaattcttcaatgatcccgctggcgttttgctttttactggaattaccgctgtcggctggccaattttctttttagttaaaaagatgagcaaagcacagaacacgattatcgaagactaaaaatctcaaatttttcttgttcatttttaataattatgatattctaattaaaattaatttaggagattcaattatgatttatcaagacaccacattggcatactcatctagctcaagttccaactgaacttgagtgattttggtgtacgtaaatcagcagccggattcactcaatcgtttctagacgataaggtgaatccggctatttttgtataaaggagaaaaaatggacaacaagcttaaacgcagtattggtttcggctcagctttttcaattgtaatcggaactatcatcggctctggtatcttttttaagcaggcttctgttcttgacagtgcaggttcaactacaatggccttactagcttggatttttggtggtctaattaccttggctgcaggtctcaccattgccgagatagggggcgcaaatgccctacactggtggtctttatgtctacattgaaaatctctatggccgcattttaggctttatggctggttggatgcagatcatcgtgtacggtcctgcaattattgccgccgttgctggttttatgagcatcatgatgactaacttttttggtttgaatcattcatggcgcattcctttggctttaatcacagttttagcaattggaatcatgaatttcttcgaaaataaggtaggtgcaatcttttcagtcataaccacgattgccaaaatgattccgattgctgtaatcaccatttgtggaatctgttggggtcaacaagatgcgattaaccagactgtagcagaggttagccaacacactagtaacttcggtgttgctgtcttagcaactttatttggttacgacggttggattttaatcgctaatttaggcggcgaaatgaaaaatccccaaaaattattacctcgagcaatcattgcaggaattacagctgttttggctatttataccctaattacaattgggattttccgcttcatccccgctaatcaaattcaccaactaggcgaaaacactactacttatctagctaacgcggttttcggtgcaatcggaggtaaaattctttccattggcatcatcatttcaatgatgggaacattaaatggaaaaatgctgacctttcctagaatcgtttatgccatggctaaacgaggagatctacctttttctaaatacttagcctatgttactcctaaaggaaagtcacccgttgtggctactttatttattgtccttttagcccttttaatgatgattttctttgatccagaccacttatcagatctttgcgtctttacagtttattgcttctatcttttagccttctttggaatttttatcctaagcaaaaagaataaagcagagcgtcctttcagtactccactttatccttttgtgcctataattgctattttaggcggtttatttgttttaatcagtgaattaattaatgatccagctggtgttttgctttttgctggaattgtcattatcggcttaccgatcttctacgccgttaaacgcatgaataaacatcgcttgtattaaagcgacttttctacactgtagcttgcacgccacaattcttccattttagctaaacgatgccaatctcctttttgacacattgtatacaaggcatgagcaggatcataagcaattggattgccctctgcttcttttaaataagccccaacaatgctgattaacatcatccgaaagcgttcaatctcattacggctaaagtaagtttcaaaatacttagttactaagcaatcaaccgttgcatgcgaagctttgcgcaaagaagcaggattcttacgatagttatacaaagtataagttgaaattccagttgctttacttaaactagtaatcttaacattacggtcagttattagtttctctgctctttgtacatcggttaaaattttgggatgcttaaagtgagctggcattgggatacgtttacttaattctgcaattaccttttcaacagcttccttcatttgctgcgtagctacttcttcgtttaccttgtcattaagcaattttcctactacaaacgtatgatcagtcacttcataccttttagtaactgcattgtaaaaataaccttcaatacctgtaatcttaactgcatcagttccagcttttgcatagtcaaaaaagatgtgttgctgatcaccagttaatggtgaaaatggcaaattatctagcgtaaaaacttgtacatttaaagtataatctgaatgagcgggatcatctgcatcacaatgatacatcttcacttcccgatcatgaataaaatcttcaaaaataagattttttccatattttttcttcatttcttaatccccttttatatagtcctattatctattataagcaaaaaactagcttttaaaagctagtttttgtttttattagaaaatattcggtttagggcaaataattaccagcagctaagtataaatcgtaccactcttgtctagtcaatcgaatcttggcacctttagcagaatccctaatgtgttgcggattcattgatccaactagcatttgaatatttgcaggatgacgtaaaatccaagctgcagcgatcgcatttttacctacctcatacttatcggccagtttttgcaactcttgattcaacttggggaagccatcattatcaatgaaagtcccttcaaacatgccatactggaatggtgaccaagcctgcacagtaactttgtgtagacgggcataatcaagaaattggctatcacgatcaactgatggtttatctaccatattcatatgcatcccaaagtcaatcattcctgtatgtttcaggctaaattgtaattgattgaacatcaagcgctggctcaagcaactttgtaacaatttaaattgagccgtatcaaaattagatacgccgaaaaagcgcaccttacctgctgcctgtagttgatcaaaagcctcagctacttcttctggatccatcaatgcatctggtcggtgaagtactaatgaatcaagataatctagttgcattctttccaaaatttcatcaacactatgcaaaatatgttctttagaaaaatcataacgttttcctggaacaattcctgttttagattgaataaacatctcttcacgcttgatctgcatttggctaaaagcttgaccaaaaatctcttctgattttccaccgccataaatatcagcagaatcaatgaagttgatcccagcatcataggcggcttgaattgccacttgagcctctggaactgatttttgattcattcgcataatgccaagtgccatcgctggaatgcttaaagtagtacatcccattttaattcgtttcataatgtaagtcctttcattctttatttacctcacatcatgaaccaaaaatagctaagtttcaaccacaagaaattcaataatcttttattaatatatcttagctactgccgattgaattgattctttatctaagaattcgtcataacttgtatcttggcgactaacaatacctttaggtccaacttcgataatgtggttagcaatagtttgaataaattcatgatcatgtgacgtgaataaaattgaacctggatatgaaacaagggcatcatttaatgcagtgattgactcaagatctaaatgattagtaggatcatccatgatcaatacattagccggttcaagcatcatacgtgacaattgacaacgaaccttttccccaccagaaagtactttgatcttcttctcaatttcttctccactaaagagcattcgacccaagaacccacgcaagaaagtattatcatcttgttccttagtcgcatattgccgtagccaatctaagattgtaagttcatcattattaaagttagcgttcaaatcgcgtgacatgtagttaaaggccgttgtttgaccccatgtaacggtaccagtatctggcttaagtttaccagcaacgatatcaagcagcgcagtcgttgctaaagcgttacgcgataaaaatgctaccttatcaccaggacgcacgatgaaagacacattatccagaatcttttcaccgtcaaccgaataagaaacgttctccaccttaactagatcattccctaagtcacggtgcatttcaaactttacaaatggatatttacgactcgatggtttaatatcgtccaaggtaattttatcaagttgtttctttcgagaagttgcctgacgtgatttagatgcattggcagaaaagcgggcaataaattcttgtaattgcttcatcttttcttcttttttagcattttggttagcagctaattcattagctagcttgcttgattcataccaaaagtcatagttacccacataaagctgaatcttaccacgatcaacgtcacacatttcagtacatacttgatttaaaaagtgtcggtcgtgggaaacaacaatcacaatgttagggtaatcagccaaaaagtcttctaaccattcaacggtatgaacatccaaaccgttagtcggttcgtccaatagcaaaatatcaggattaccaaacaaagcttgggccaataagaccttaactttttcgctttcaggtaaatccttcatcatcatttgatgttcttcttcaggaatccctaatgattgcagcagcttagccgcatccgcttccgcattccaaccatcaagttctgcgaacttgctctctaattcagctgccttaaccccatcttcatcaccaaagtcaggtttggcataaagagcatctttttctttcattacttgatacagttccttgtgcccttgaattactgtgtccatgacagtgaagtcttcgaaagcaaagtggtcctggttcaagctggacatgcgctcattgggatcaattgaaattgaacctgttgttggttccagtttcccctctaacaatttaagaaaagttgacttaccggcaccattggcaccaattacgccgtagcagttgcctggagtaaattttaagttaacgtcttcatagagtgtgcggccaccaaatcgtaaactaacgtcggatactgtaatcaatctctttacctcgcttaaaatataaaattatgtttaagtatatcaaaaaagatggtcccttataatagagaatccatctttttaagcaatttattaaaactttttgaagctatctagcttttcctgggtaatatcacgaataattgcagtagctaaatcaactgaagccttaaagtccttataactactgaaacaatatggtgaatgttcatagcgcaccggaataccgatgacaattgttggcgcaccattttcgtagtaaattgcagcaccatcctgaccgccaccggttctaaccgaacgagtatatggaatattatttttatcagctaaatcacatgcatattgttggaacttaggatttggtaaaaatgtcgtatccatatcgcgcaacattgggccacgttttagaccagtttgagaaagccagtcaggcgtaaaagtatcatcagctggacagctttcgagtaccagacaaagatctggcttaacttttctagccgttacataggcgccacgcaagccaacttcttcttgactagaaagtgcagccactacgtcaaagttagtttcttcacccttcaaattatcaagcacatcaaccatcgcaccagcaccaaaacgatcatcaaagtctttaccgaagaataaaccggacttttcatgatattcgcatttaacatcaacaaagatagggcaacctgtatcaatcttgtagtccttgattgtctcctcacggctagaagaaccaacatcaattgacatatctgccacatcaggtacactattgcgctcagctgctgtcatgaagtgaggcggcttagttgctacaacgccagggatatattctccatcacgattgcgcactttaacgcgcaaggctggaatattatattttacccaaccaccaagtggaacaaacttaattaaaccattagggcgaacagcttgcgtaatgaagcctacagcatctgagtgcgcatcaagttgaattaccggtcgatttcccttattttctttcttggcggccccggatttaaaattgaagtgcaacactaagtgttaaacaaaaaggccatgaagacctaaacttgaagtgacgaaaaatcaagaaaggaagatcttcatgaccaattcaaattctagcatttctaagcactatcatcaattaaccagcgtacaacgtggacaaattcaagcaatgctggattccggcataacttcccgtactgttatcgctcaagaagttggctgccataagtcgacaatcagtcgcgaaatcaaacgcggaagcgtcctgcaaagagacagcagctatttattgtatgagcactattacgctgatactgcacagatttattatgagaagcgtcgcaaaaactgctatcagcgcaatccattgaagcattatgctgtctttttgagaatgctctccagacgctttaaagctaaatttgatgccaccagcatcgatgagttcgttggtgaattcaaaaggactatgccaggctacccttgtcccagcacaccaaccgtctatcgctatattgatcagggcttgctggacataagcaatattgatctgcctatgaagctcaaaagacgcaggaacaagcgtcatcacagccatggcggtcacgctttgcacaagaagcatcttggcaattccattgaacagcgtcctaaagagattgaagacagaaaagctccgctgcactgggaaggagatctggttaaaggcgtcagacgcaagaatcagcctgctttaatgactttgactgaaagaaccacacgctttgaagtagttatcaagattcctgactatcgggcaagcacatgccaaaggctgcttcaaaaggagattgacagacatcctgcctggtttaaatcaatcacgtttgacaatggctctgagtttgcggatatgaccaagatcaagggctgccagatttactttgctcacccatattctccatgggaaaggggcaccaatgagaactgcaatggtcttttgcgtcaattcttccctaagagcaagagcatgaaagacaagtcaaaagcttatgttcaacaggcaactgatgccattaaccacaaatatcgccgaatcctccaatatcacacagcagaggaactcttcaagcaatatatctcttcataacctaactgttgcacttaatttgacaattcaggaattatttattttaagaatgttacaaggtatttttgcaggctttgtttctaattccaatgctctagttgcgactgaaactccgaaggaaaaatctggacaagcacttggcactatggcgtctagctttactgctggcaacttactcgggccatttattggtggagccttagcgtctattttctcctatcgcgttaccttctttattacaggtggtctattattaattgcatttcttttgtcattgttctttgtccatgaaacagacttcaagccagtaactgaaaagaaacttgataaagcaagcggagtaattaaagaattacgctcaccgcaattaatctttggcttgcttttaactactctaattattcaagctgcaaataattcgattaacccgatcgtttcactctatgttaaacaattgatggctaaccacggtaatgtcgtctttatttccggggtaatagctgctttgccaggaattgctacattccttgcggcatcgcgcttcggtgcactcggtgaccgaattggaactcataaaattattattgctggctttattggagccacaatcctcttctttttgactgcttttgtacaaaatactgttgaacttggtattttacgctttttagtcggctttactgatgcttgcttgttccctcaagtgcagactttgcttactaaaaatacgccagcaaaaatcacgggccgaattttctcttggaaccagtctgctatgtacatcggtaatattttcgggcctctgctgggttcaactatctcaggattaactaattacagcactgtctttatcgttactgctgggattgttgtcttcaatttgattttgtttagatttaatgtgattaaaaatttgcagtaaaaagtgtctgggaaaaaactaagtctcagatcatgaaaaaagaacgttgaatttttgtttcaacgctctttttgtatacttttagctccagccttgatattattaaatcatcacaaaataaaaacaaaaaggtggaaactaacatgtacaagaattatatcacaggtcaaactgctttaacacttaatctagattttgccattccggccaatcatttggctaatgtcatcagctggtttgtagattcaattccagaagatgttttagtaggcaagactgctaaaacgggccgcccagcctatcatccagccatgatgctcaaaatactgctttttgcttactccagaagagttttttctggcagaaagattgagttgatgctggaagaaaatctgccaatgatgatcttggctgaccagcaaaagatttcatatcatactatcaataattttagatcaagcagccatgccaatgaactgattaaaaagagctttatctacttcactaacctgttagaagatgaaggcttaatcaatgaaggtgctgcttttatcgatggtactaagattgaagctgatgctaaccgctatacatttgtctggcgcaaagcggttgaaaagtatcatgaaaagctgaaaggccaggcagttgaactttatgatgaattgattactaaagaagtagtcaaagaaatggaaaaagaaaaagttcaaactagtcaggggctaaaggaattagctcaagaaactgaagcagaaattaacaagctgactaaagagattgagcaggaaaacaaagccattcctggcggttcacctcgaaaagccaagcgacgtggactaaaaaagattctgcaccggctaagaaaagattatgtgccaagaatgcaaaaatatgaagaagccgaagagatctttgccggacgcaacagttattccaaaacagatcatgacgccacctttatgcatatgaaggaagaccacatgaaaaatggtcaattaaagcctggctacaatattcaagcagtcacgaccgatcaatatgtagttgattatgccatctttcctaatccgacagatttcaaaactttggagccggttttggatcaaatgaccgtgttggacaagtttgacaaaatcgtcgccgatgctggctatggcagtgaatacaattattcgatgctggaggaaaaatatccagacaagaagtactttattccctacactatgtatgaaaaagaacagaccaaaaagtataagaatgatccaactaagctaatcaactggtactacaatgaaaaagatgattattacattgatcatcatggcgtcagattcaatttcaaatattacagccagcgcaaggatcgttctactggtcaggtccgtgattttaaggtttatgaggcagacgagttccagctaacgccagaattggaacaattggctaaaacagctagcggccgccagcgccaagttcgctataatcctaactggcaatatttaaaagaaaaagcaaaagaagttctccaaagcgaagaaggcagacacatctatggcatgagaaaatatgatgtagagccagttttcggacatttgaagaacgtatttggcatgcgcagaacgcacctgcgaggtaaagagaaggtcgaaaccgatatcggaattgcctttatgatgatgaatttgaacaaatattgtcaaagaaggtggctgaagggccgatttttattgttaaaaattttaaagagaacaaaaaaacgatcaagattcttaaaaaaggaaatcttgatcgtttttattcatctggaagctagttttttcccagacacttttctattccgcagctttctttgcttcatgatgattataaataaagtttgcaacatacccacaaataattagcaacaacgatacaatcataatttctctaattccggtatgaaaaattgtccgcattgttggcattaacgccttaggcaaactcttcgcagattctgcgtcactcaacttattcatcatggtcatcgtaatattgtggtgtccagcaattccacgtgctagagctaaattcataatcaccccataaacggcagccataatagtttgcgctaaaattctaatcaaaaaactaagcgatgtagcaggtgccatatccttttcaccagcgtcaatctgcacttttatttgaagaataacgaagattgagcctacacctaaaccagataacgctgcaatcgacatcaaaatctgatatggcgtactaattggtacaataattaaaccgattactgttattgcaatcaatgtaaaatcgaaaattaacaaatgataattattaaaatgtctgagtaaatgcggcgtactttgtgaaccagcaatatcaaagattgagttaggaatcaacgtcatcccaccgattaaggccgttgtccctaagattgcctgcgaccacatcggcaaataagtgttaactgcaatatatgcaccccaggcaaaggcaaaaagaatgaagtcaccaactaaagctttattagtaaaaaccgataatggcacgataggactagcagcttttttctcaactaagatgaaccagacaagcattacgatcccgataatcacgaaaatagccactagaaaattactagctagtcctaacatctgaattccaatcaaaaagcaagtcaaaccgccaattagggtaaaagcacctagtcggtcaaagacagtattgatgtttggcttacgaatgccacgataaaaaagaaaactcaagataattgataccaatcctaatggaacattgatataaaagacccagtgccaggacaaagcatcaacaatccagccaccaactagtggaccagcaatacaagcggccgaaaaactagctgcaatataactcaagatgacagttctacgtttaatattcggataaatataaccaacaatcacataaggaagagaacccattccaccagcaccgacacccatcagtactcgagaaacaaggaaaaagtaaatatcgggagccactccttctaaaactgaacctaaaataaataaggctagtgacagttcgaaggcaaatttgttacccattctttcaccaattttactccaaattggcactgagaccgacattcccagtaaaaaacaggcaacaatccaccccatatactgaattccgtgtagatcggacacaattgctggaatcgccgtattaataattgtcgcatctagccctgacataatattagccagcaacaaagacaaagtaaccattgatatttgcttcttagtcatttaatcccacctttttaactctaaaaactactattactcatagtatgcaagatttaactagcaaaataaagcacaatatttttccactaaatcttgacaatctgtgtttttccgagttaaatataaagaaaataatagtgatgacctttaaagttagtcccgtgaggctaagaaggaaatctgcacaagctaatactttttgtcgttagctaatacagaaggaccatcttgagccatgcgctcttggtggtctttttcttttggtcatccagaaaggaaaagctatggcaaaagaaataatcgatgctttaagcatgaaacgcgccttgatgcgaatgacctacgaaattgtcgaacgcaataaaggtactaaagatcttgtattagtcggaattaaaactcgcggttggtacttggctgagcgaatcgccaaaaatttgaaaaacttggaagatgttgaagtccctgtaggggcaattgatatttcacaatatcgcgatgatttaccagaggctgagaaggaaaagatgatccacagccaacaacttgacttcgatatcaccgataaaaacgttatcttagttgacgacgttcttttcacaggtcggacaattagagctgcccttgatgcgttaatggatcaaggccggcctgcaaaaattaatttggctgttctagtagatcgtggtcaccgcgaattaccagttcgtcctgattttatcggtaaaaatattcctaccgcaatgaatgaaaaagtccaagtctcaatgaccgaagtcgatgagaaagacagtattgaaatcgttaaataggagttttaaatgaataaaaaagaaaagtacagaaaccctgaggctatcttagacgtttatgaaaagcctgaatttggccaaggcgtactgctatccttacagcatatgtttgctatgtttggttctaccgttttagtgccaattttaattggaattaacccaagcatcgctctactttcatcaggaatcggtaccttggtccacatgctcttgacccacttcaaaatcccagcatacctcggatcaagttttgccttcgttgctacaatgcaagccttaatgaaggctgatggctacccggcagttgcccagggtgcgatcgcttctggtttagtttacgtagttgttgcgatcatcattagcaaaattggttcaggctgggttaacaaagttttaccaccaatcgtagttggaccaatcatcatcgttattggtttgtcattagcaactactgccgctaatgacgctatgatgaataattctaagtatgatttgacttacttcggtgtagctatcttcactttggtcatgaccttagttttccaaatgtgcttcaaaggcttcaccagtttggtttcaattatgctaggaattatctgtggctatatcttatcctgctgcctcggaattgttgatttctctggcgtggaaaaagcagcttggttcacattgccagcacttgatgtgcctggaatcagttaccacttcaaatggtatcctgccgctattttagccatggcaccaattgctttcgttacaatgacggagcacatgggccacattatggtattgaattcattaactaagcgtgacttcttcaagaatcctggcttacacagaacgatgatgggtgacggtctttcaacgattatcgccggtttcattggtggtcctcctaccacttcatacggtgaaaacatcggtgtgttagctatgactaaagtttactcagtttgggtattagctggtgccgctgtttcggccattatcttcagttttgtcggtaagcttgccgcattgatcgaatcaattccaatgccagttatcggtgggatctccttcttactctttggtacgatcgcatctaacggtttgaagatcttagttgatgatcaaattgactttggtgaaaagcgtaatatgttaattgcttcagtcattttggttatcggtatcggtggtgcttacctacaactgggcaatttccaacttacctcagttgccctttccaccattatcggaatgcttttaaactggattttgcctaagaaagcagctagtgaaaaggctcaagaagaaaagattaagaaagaaaaacaagaaggtaaaatttaccaatagatagaataagccatttaaaacccgttagttatcgcaatgatagctaacgggtttattttttactctcactttgcgcacacaatgttgtaagttgtgcgaaagttggcaaaagttagtgtaagttaattgtaaaagcttaagaagctaacaaagccctatatatcaaggcttcgagctactttagtaaaaactttgctctcactttgcgcacgcaatgttgtaagttacgcgaaagttggcgaaagttagtgtaagttgcgagagcaatagtatataatttattgacacaaataaatttaagtcatgaggtgacattaaatggactttttaaacttcaaagcaattacacaaactggtaattttaaaacaccatctgaaaatgaaaacatcgaatacaaagaagctagttggaaattacctaaatcattttgggaaactgttagctcttttgctaatacttcaggtggaataatgagactgtaaaatagtttgtgtaaggatgaatgattccttaaatttatttctttaaacattagaaaaaggagttcctttctcgtatgattggtttgaacaaaaaaacacatacagaaagaagaactccttcatgaatgattttaccaaagattttgctcaagctctattcaatccagacaaaataaatgatttattgcgcaaagagctacaacaggctgttaataacttgttagaagctgaattgactgcctttctgggctatgatccctatgccagaaatggctggaatactggcaactctagaaatggtgcttatttccgcaaagttgatacgcaatttggcccaattgaagtgcaagtgcctcgggatcgcaacggtcaatttcatcagcacacgctgcctgactacaagcagcactcggatatcttggaaagcatgattatcaagctttactccaagggcgtgaccaccagggaaatagccgatctaattgaaaagatgtatggcagccattacagtccagctcaggtatcaaatatttccaagcagatgattccaaaggttgaggcttaccacaaacgcaagctaagcgacaagtttttctgcgtctatttggatgcgacataccttcctttgcgccgagaaacatttgagcgtgaagcagtctatattgccattggcatcaagcctaatgggcacaaggaggtcattgactactgcattgcgcctagcgagaacattgaagtctggacagatatgcttcaaaacatgaaatcccgaggcttaaagcaagttgagctttttctttctgatggtgttgttggcatgaaaacagccttggccaggacttatcctaaagctcattttcaacgctgtttggttcatgtcatgcgcaatatctgcgctaaagtacgcgtcgacgatcgtgaaaagatcatgaacgaattcaaacaggtgcatcaacagacaaacaaagaagaagccacagctgtcctgcatgacttctataccaaatggggcaaggtttacagccatgttatcagaagcttgaaagacatagaaccagatctgctggtcttttataactatcccaagcagatcagagcttcaatttattcgactaacatgattgaatcatttaacaatgtgatcaagcgcaaagctaagcctaaggcagagtttccaactgaacagtcgcttgatgcttttattggtattcaggcaatgagctacaatgaccgttatttcaatcgaattcataaaggctttggtcaggttcaggacaccttagaatcctactttgattaaataaataattaaaaaatcaatttacgagaaagaactatttacacaaaagatttgacagtttcggaataatagtattaggcatagcagaagataagaataaacatgaatttagtataactggtgtagacaatgttgaagacattgaaacacaaattttcaatgataataacaatatttcatgccttaatcgacctgtaatccaaaataatgatgttcagatttctttttttcaaaataaaactattattcaagtaataattcatccagaaccctttaatactcgtccaataactgcattcggtaaagcatatattagaactggtgacagagatcgagtagctactaaagagcaacttaaatattttacagttgaaagtcaaagcgagattgatactcacttactaccttcgacctatacaatagaagatctagatgcagaaagtatcaaagaatatcgcaaaataattgaagaaaaaggtattattaatactaattctcaacttagtgatcaagaattcttatattcaattggtgttttcagaaaagatcgattaagtaattcaaatgaatatcatcttacagatggtggtctccttttctttggaaaatatatttcgataacagatcgtttcccacgttttcaattagactatcaacaatataatagcgataattctaccaactggaatgatagagtttctgcaggtgacatgaattatcccactttaaatatcttttctttttataatttagttttagctaaaatagaaacaaatatacgcatggtgctagttaaatcgttttagttaataaaaaagtccaatcttgttagactcgacttgtaaatagtaataatagaaaagagtctgatctgattgaactgtcttaagcttaagcgttttagccaccatttacaagttagttttaaagatttagtgataatttgtcggcactggtatcgtttgtatgcaccggctgagtttactcatcggcgaaatattgatcaaattaaaactacggacagtctgattttggctttacttatctggcaagctaagacaggaattgaatcacaaagaagattctgtgaatgtttcaattgtttatcacactcacgttttaatcggcgttcacgtcagctattgcaattgatttatcagatacggcaagaaatgaataaaaaggttgacctgaatggacatttcttgatcattgacagctttccggtacctgtttgccaaccaattcgcaactatcgtgctaaaatttttcgcggttatgccaacattggttataaggccaccaagaaaatttacttctatggtttcaaagttcatgccattgttagcgatgacggttacattcttgattatgtcgtaacaaaagcatcagttcatgatgccaaggagacagttgaactgctggaaaatgcccatccatctaattactatcttcttggcgacgaaggctatttaggcaaagaactgcatcaacagctaaaacaaatgggttatgaactttggacaccatatcgtaaaaatatgacaggagctaaaaagcacaatgatcatcaattgatggctattcgcagaacaattgaaagcgacttttcgcttctgacctattacaatgccgagaacaatcgagcacgtagtctgataggctttcaaagccggttggaaattgcaattttagcttataatttggcttattgtctagaaagatttaactagcaccacgcgtacaaatatacctgatccatttattcaaggtaatgaccttagtagaacgtcctatcacaacgatctaatcatcgcagctaaggaagccctagtcaattgtttaatgcattcatattatgatggtatggtaggtgtaaaaattgtagatagacctagttactttgaatttacaaaccctggtactatgcgcgtaagtaaagaatcgtttttacgtggacaatattcctccattagaaatactgaaatcgctagtttattcagacgaattggtgtctctgaaactgcagctagcggtggtccaagaattcttaatactgtgttgcaaaataatttaaatgatcctgaaattaacattgattatgaaatcaatactactcgcattcgtatttttaagacttttgcaattgataatcaggaaaaattaactgaaccagagaaatttattatgtcttttgctagcagaaatcctaatttttcaataaatgatattgttaaagatccgcagaatcattttggtaaacaaaccacgattagaaaatatgtaacttaaacttcccacacgcaaaattgcttgtttcattgtgattctgcgtgttttgacaaatataaaaggcacaagtccttttcattgctataattatattgaccaaaacataatttatttgcatgaaaggcttgtgccaatgtctattttaccatctcctgaccaacaaaatgaacaactattttcaaactcaatcatcagcttcatcaagaagtttcaggtgatcaagctgttgagaaaatgtggcttccgcaaggaaaaaggcattagcctgttcagcttgtttctttacgttttaagcaatgtctttcgtgaccgcagcttatatatgcagctgaaaatggatcattttcaagaaaatttttccaagaactcatattaccgttttatgcgcaacgttcacgtcaattggctccacttcaccacacttctgtctgcgcaaatcattaataaccacttgcgatctttgacttcagaaaaacgggctgattgctttgttgtcgatgattcctacttctctaggaccggcttcaagaaaacagaattagtcgccaaagtttttgaccatgtatcaatgacttacaagaaaggttttcgcatgatgaccctgggctggactgatggagcttctttcatgccaatcaattcagtgctgctgtcttctcagaagctacagaatatgattggcgaaaataaagtttttgatcagcgcaccattgctggccaaagacgtatgcttgcccggactaaaggcacagacgtgatggttaatttaatcgaccaagctatgaaagcaggtcatcaagccaagtacgtgctgtttgacagctggttctcaaatccacatcaaatcgtccagctcaagcaaaggaagctggatgtgattgccatggttaaggttagctccaaaatcaaatatgaatttgagggagaacgcaaaaacatcaaacagatttatcgcagctgtaaaaagcgatgcggccgttctcgctacctgctgtcaatcccagtcaaagtcggacgccaggacaaagacggtgctaaaatagatgcacggattgtctgcgttagaaaccgtgccaatcgcaaggattggctggcaatcatttgtaccgacatgtcgcttagcgaagatgaaattatccgcaactacggcaagcgttgggatattgagggttttttcaaaacttgcaaaagttatctaaaactaagtacggaatatcatggcctgtcttacgatgctttgaccgctcatgttgccatagtttttactcgctacatgcttatgtcagttgccaagcgggacgatgaagatgaacgcacgctaggcgagctgttctattgcatgattgatgagctggcggacattacttttagccattccttgcaattgattactgatgcaatgctggccagcgtaaagcaagtctttcatgccagtgaagcacaaatagctgaattcacggctgactttatcaatcgtttacccaaatacatgcaaaaattgttaaagaaaactagcaaaaataatatagaagcctaaagccaagcaagatcaagagattactggcttatttagtgtgggaagtttaagtatgtaaattcattagtagagaagcatttactatccaatgagaaaattggcaaaaaatatatctacaatttacagaaaaacaatgattatctaaatcgcgttaagcaccttaaacatcttgaagataatttactcaaatagatcattcaaaaagctcaacctacaaaattcatgcagattgagctttttcatcttatttatcttcaaatattctaggcttatcgtcatcaagtgaaacatgcggaatttcggtgttatttgtctcaacttgatccttctcagacaattctgccttcattaactcacttttggctttactagaagtattgcctaaaagtaaagttttctcctgcggcgtattcaccattgcctgtttttctttgaattttttataaacaatcgccgctactgcaccaatagctccagcaacaccgataattgtgccgattaatctcatctttttcatagggatcacctcgtattttgaaatcactttcttattcttaattatatctaattatgaggttgaacacatttttaatgcctattacctaaaactttccgcaatttccggatccatctcatcttctaaaacactgtagccttgatccaaagtcttgatcaatgccatatcctcatcatctagttcaaagtcaaacacatcaaagttttctgctaatctagccttatgaactgacttaggaattactacataatttctttgcaaaaaccatctcagcatcacttgagcagtagtcttatgatgcttttctgcaatcttttgcaagacaggattagtgaaaatgtggttggctccttctgcaaatggtgcccaggcttcaggttgcacgccctctttttccatatattgctgtgatttccattcttgattccagacattagtctcaatctggttcacagccggctttacatcattaaaagtaatcaaatcagctaagcgttcattccaaaaactacttacaccaattgcccgaatgcgtccctctttatataaacgttctaatgctcgccaagtgccatagtaatcgttatatggcttatgaatcagatacaagtcgatataatctaactgcaactttttcattgaatcatcaaaagcttgcaaggtatgatcatagccatacttatcgacccagatcttggaagtgacgaaaatatcctcccgtggaatgctgctatgcacaagtgcatccccaactgcctgttcattgccataaatttgcgcagtatccacaagtcgataacctacttccaagccgttttctacaacttgttgagtttgagctaaatcatcaatttgataaacgccaaagcccaagcgtggcattttgacaccattatttaaaattacatagtctttcatatttcttctcgttttctagttaattattgctatttaattttattttaacatagcccatgaaattcgactttatttcgtgaaacatagatattatttcttaaaattaagcactcaagaaaagcctaaccagcatccctcaacggaattgccagttaggcttcttttatttttcaacttttgcttgataaaatccaaagctcatctgcttcaacattctagtaaaactatcaatgtctagctttttaccggtagtcaaagcttcaaattcaccatcaggatcaaccaatttgcggtcagtcctgtgaaatccatttctttcatagaatttcaggcgactaacacgctgcttataatttttcgccttcttggtaactggctcaatatcaatgacaatttgcttatcagggaatcgatcctctaacatcatcaagatcttggaaccataaccttgtcctcgcaatttttcattaatggctaaataggtcaaatagactgtattatcattctcagcataataagtaatgccgcaaaactgaccatcattataaattgcgtgaaacttaacatttcggtgtaatgacattgctaaaagagaaaacatggagaatctttcccaagctggaaaagccttcatatataacttcttagcgtcacgatatgcttttgtgccccatcgggcgggtttagagtctaaaatagtatccttcttttctaattaaaaattgattgttaataactctgaataatattattatacaaaactttttagctttttggaaactgtcaaatcttttgtgtaaatagttctttctcgcaaattgattttttaattatttattcaaaataagattctaaggtatcctgaacctgaccaaagcctttatgaattcggttgaaatagcggtcattgtagctcattgcctggatgccaataaatgcatcaagcgactgttcagttggaaattctgccttaggcttagctttacgcttgatgacgttgttaaaggattcaatcatattggttgaataaattgaagctctgatttgtttgggataattgtagaagaccagcagatcgggctcaatttccttcaaacctttgatgacattgctataagctttattccatctggcatagaatttgtgcaagacagctgcagcttctttttggcttgtctgttgatgtatctgcttgaattcgttcatgatcttttcgcggtcatccacccggactttagcacagatattgcgcatgacatgaaccaggcagcgttgaaaatgagctttaggataagtcctggccaaggctgttttcatgccaacaacaccatcagaaagaaagagttcaacttgcttcaagcctctggacttcatgttttgaagcatctctgtccagacttcaatgttctcactaggagcaatgcagtagtcaatgacttccttatgtccattaggtttaatgccaatggcaatatatactgcttcacgctcaaacgtttctcggcgcaaaggaaggtatgtcgcatccaaatagacacagaaaaacttgtcgcttagcttgcgcttgtgataagcctcaaccttggggagcatctgcttggaaatatttgatacttgagctggactataatgactgccatacattttctcaatcaagtcagcgatttctctggtagttacgcctttggagtagagcttgataatcgtgctttccaaaacatcagagtgctgcttgtagtcaggcagcgtgtgctgatgaaactgaccgttgcggtctcgaggcacttgcacttcaattggtccaaactgggtatcaaccttgcggaaataagcaccatttctagaattgccagtattccagccatttctggcatagggatcatagcctagaaaggcagtcaactcagcttctagcaagttattaacagcctgttgtagctctttgcgcaataaatcatttattttgtctggattgaatagagcttgagcaaaatctttggtaaaatcattcatgaaggagttcttctttctgtatgtgtttttttgttcaaaccaatcatacaagaaaggaactcctttttctaatgtttaaagaaataaatttaaggaatcattcatccttacacaaactattttacagtctcgctttttgacataatacttatcttccattcaaaatttaagtatgcattaatattatttattttagtaaccagtcaatgacattaacttggctaattccattatcatcataacttcccggatcttcggtaagtaatatcttagggtagttatccttaatctctaaaaaaggtgctatttctctttgataagttttttcattctgaaccgttaaactaacttgatagtattcccgaataccatcgcgaatagcaacaaagtctacttccttttttcctaaatttcccacatacacttcatagccacgtctgattaattcaagatagattatgccctctaatctgttccccatattaggacgcttttgccccaacaacgctcttcttaatgaaggatctaccatataatacttattgttaatttgtaaatactttttaccagcaatatcataacgatcacagcgataaaataaatatgaatctaccaatttttctatatacgccatcactgttgcgcttgtcgctttaacgccattattcgatagcacattcgctaccttagttggagtaattaaattgccattagtatcggtcaaaaaagctgcaatatgttccaacaaggtagtatttcctcgttgcattctagctaagatatccttaaccaagacagtgttaataattccttgaatataagacagataggtattttcatcctctaattcagtagcaaaagggaatcctcctcgctctaaataacgattaaaagcttcttgatgggataactcaggaactgaggctaaaaattctttaaaagaaaagggatatacagggatttcaatatacctaccagccaataaggttgctaattcacctgaaagcataaaagcattcgatccagtgacataaagatcaacattttgcttgataaaaaggctatcaatagctttttcgaaatgagggatgtcttgaatttcatctaagaaaatataattcattttatctggaatcaatcgttgatcaatatattgatacaattttaaataatcagtaattgtagcaagccctaaatcttcaaaatttaaaacttgaatttgttcctgcttaacacctgctttaagtaattgttcctgatatagttttaaaatcgtggacttaccagaccgacgtactcctgttaaaactttaattatttgtttatcacgtagtttattcaatttatcaatgtatttaggccgcggaagcatttttaatcctttcaagttaatgtaattcaaattagtttaattttcacgtcaattttagcatataattcaaattagtttcaatctcttaaaacttctgagatgagttttaatttaatttgaatttactcaaaggcttaccactaaatttaaataaaaagaaagtctgtcaatctaacaaactttcttttttcataaataatcgttaactacatcaacttatatttcttcatcaattcttcgatataagtgcccttaaccttcttaagcatccctttaatcgcaaacttttcaggcattggcaaatcaagatcagccaacttcttctggtcattcaggtaatacatcgcattcatcaacattctgacatcaaatgcggaagcgaagacttctggtacaccgcggtcaatattaagcaaagtgtagacagcttccattgccgtccgaactgaatactctgtcgtaaagacagtgtctcttggagtttcggcaaagttaccaataaaggctaagttcttagaatgatctggaacaacctttgggcggtcgcctaaagctcttggcataaagtaagaagtaatatatggcatgtgaaccggaattgttgtagctgcggcagctatttcaggaattctttcttccggcacacccatgtgatagagccactcttcacacatttcaagcccattacaatcaggcatcgtcttttccacataattacccttggtatcagagaataaaccatataaccaaacaattaattcatttggtttttgcgccttaaagtgtggctgacggctgattgagtaacctaatagccaattagaatccttaatagtagttggtccactagttacgattgagccactgtgtggatcctttttattaacagcttcaataaatggcacaacatcatcattcttaaaggtaatagttgaagacatccgccagttagcctttggaatatccttgcaaaagacatcaggatggccaaagtcttcatcttgagctgctaagttcttccacaatcgccagcttgcacccaattcatgttctgctggagcgtgatgcagttgatctccataggtagtactctcagtaattgaaccattagtaacgaagactaagtcatttggtgttaagtcaatggtcttcttttcgccatcttcggttaaaataatttgtttagcaaccttttcgccgtcagagcggttaacaaagatattatcaaccaccgtattatagtggaagattacaccacgatcctttaaatacttgaccagcggcaaaatcaatgattcatattggttatacttggtaaaacgcaatgatgaaagattcttcaaggttgctacatgctgtacaaagcgcatcaagtagcggcgcatctccatcgcacttgcccatggttcaaaagcaaacattgttgaccaatataaccagaagttagattcaaagaattccttagtgaagacttcattaatcttcttattttgcaagtctttttcgggagttaaacaaagatcaacaatttccttcactgcctttggtgtcaaaagaagttgcccatcagtcggcaaagcttgaccacgatttacaattactctagttttagcataacttggatcttttctatttaaacgatagaaggaatccaaaatagattcaccttcatggtcaggcgaagggattgatctaaataaatcccacaaacattcaaagtgcggctccatttcacgaccgccacgaatgatgtaactttccttttctttattatagatcccatccattgagccaccaggcagacctaattcttcaaaaatgtgaattttcttgcccttcatttggccatcacgaattaaaaagacagcagtagctaatgcagccaagccactaccaacaatataagcagatttttgatcaacatctttaggtttatcagccttaacaaaggcttcataattgccattactataatgcataattgacacttctttcaataatcgttacacttgtaactatttatgcttataaaataatgtaagcggtatcagttgtcaaacattttacatttggggatgatcttgatgaatatgaagagtctgcatacgcagcaacaaattgaacatgcattattcaaattactacaaaaaaagccttatacggagatctctattgcagaaatcacccgtaaggctaaggtatctcgtacttccttttatcgcaattatgaccaaaaagatgaagtcattgcgcaatttttatttaatcaataccataattttatcgctgatattgatcaacataatttgagaacttttaagcagcagcttactgcctaccttgaattcttcaaagataatcctcaactaatgaaattactgcttgatgcaggatttgaaggagaattacttaattttcaaactaaatatttgaaaaagctgatgtcagtttaccattctgatgtccacctacccgactatgcaatagcctatcaatctggtggaatctatatgctgttagtctggtgggttaagcaaaattatcagaccagcttgactgatttaatcacttatgccgaaaaacacattatgctgtaactaaaaaagaagagctcacaaatcgagcttttattttcaaaattattacaatttcttgcattttttaccaaagttaaagtagaaattcattacaaaggcgataattaacaaaatcaatgaaaccaacataatttccttaataccgccgtggaaaatagttctcattgttggcactaagttttgcggcaaactcttggcactttgcgcatcactcaatttattcatcatggtcatcgtgattcccttgtgcgtttgaactccgctggcccagttcagattcataattacgccataaacagcagccattactgtttgagctaaaattctgatcaaatatgaagttgaagtggccgttgccatattctttagtcccgcatcaagttgtacctttaattgcaaagcaacaaagataaagccaaccccaatgccagaaaatgcaccaataaaggtcaacatctgcacaggcgtatgtatgccagaaataaacaaaccagctgatgagataatcatggcaactattccaatcaaaactaatttaaaggttgtcatatgctcctgaatcgctgctacactttgagatgcgataatttcaacaatcgaatttggaattaacgtcatcccaccaattaaagctgacaagcctagtaatgcctgagcccacattggcatataggtgtttactgctaaaaaggcaccccaagtaaaggcaaataataaaaagtcgccatctaaatctttatttttaaataaagaaattggaataattggattgtctgcatgaccttcgcgaataaagaaaaagacgatgaagactaaactaattataatcaatccaattatgatccagctagcggttaaaccaactagttgcacgcccatcaagaataaaagcagtccgattactaataaagtagcaccagggatatcgaaaaccggtgtcttttttggagtaaccggtttgtagtaaattaaacaaatcaaaaatgcaattaagccaattggaatattgatatagaagacccagtgccaagagaaagcatcaattaaccaaccaccaacaagtggccctaagatcgcagccccattccagctggcagttaaatagcctaatactttggttctcgttttaatatttttaaacacataaccagcaatgatataaggtaaagaacccataccacctgcaccgattcccatgataaagcgagagcacagaaagaaaataatatttggcgctatcccttgtagagccgatcccaaaacaaagagtagcaatgaaagctcaaaggctcgtttgttagtgattttctctccgatcttggtccaaatcggaatcgaaatcgacattcctaataagaaaattgccacaatccaacccatgaattgaattccgtgcaaggccgcgacgatggctggaatagcggtattaataatagttccgtctagccccgacatcacgttgccaagcatcaaggctgccgtcaccattgtaatctgttttttattcatgcttaacttctttctatggtatgtaaaaagcgttagacaaaaatttctaacgcttttgagtaaaaaaatatggaggatacagggctcgaacctgtgacctcctgcttgtaaggcagatgctctcccagctgagctaatcctccattatggggcggaatgtgggaatcgaacccacgcatgctggatccacaaaccagtgtgttaaccccttcaccaattccgccatcaacggtccatatgggatttgaacccatgatctcctccgtgacagggaggcgagataaaccactgctccaatggaccaaactagaggaggatgtgggatttgaacccacgcgcggcagaaccgcctaacggttttcaaaaccgtccccttaagccacttgggtaatcctccatagccgaacagatactagtataccaaagtgagaagataacgcaagaccttttttaaaaaaaagcaaaaaaataaagcctttcggcttcattaactatgtaaatttttctggaacagcaaatacttatattctttgccagcaatttcaataaaacgttgggtagcaatattacgccagccaaagtgcttaaagaattcttgtgcatctttatcttcagccagacaccacaagtaaatcttgccatagcccatcttcttcagttcattttctgcggcatttagcaaggtcttacctacattgtagccttgaaaatcaggtttaacatataatgccatcaactcaccgcagccaagcattctagtgtcacgtggacgaccatagctaacggctgcttgaacctcgttattatcgtctttaaaaactaaattatgacgaccactctcattgagtcgttttacccaagcagtagccggaatattatccaaaaatacatctggtagcacgcctttatacgtctcttgccaagttgtttggaaaagcttacttgtttgttttgcttcgtcttcactaattaatggtttaataatcatatttacttcttctttgtcaaaacagtcacagcctctacatgtggcgtttgtgggaacatatcaacaggatcgattcgcttaaattcataaccttgttcttggaacaaaagcaagtcgcgaatcattgttgcaggattgcacgaaatataaacgaccttcttaggtccagtcttaactgtcgcattaataaattcaggtgtcaacccttttctcggtggatcaacaaaaaccacatcggtcttcataccctttttagcccaacgcggcattatttcttcagccttgcctaagtaatactttgcgttttcaataccatttagctcggcattgtccttggcatccttgatcgcatcccggacaacttcgattccacgcacggccttcacatgcttagctacactcaaaccaatcgttccaattcccgaatatgcatcaattactacatcatccgaacctaaatctgcttgcttaatcgctaaatcatacaagcgcggtgtttgcagcgaattaatctggaagaaactttgaggtgaaattctaaactttaaatcaccaatttgatcagtaatctggtcattaccgaaaactaggtaatcctttttacccaaaatcacattggtcttcttaggattatagttcaagactaaacctgaaaccttaggaatctggctaatctcagctgcaacacccatcatttgtgggaaatccttaacccggctgaccaaaatgaccattatctcgccattagccttactacgacgcacatcaagatagcgtataattcccgtattgtttacctcgtcataaggcgcaatcttgtacttgcgcaacacatcacgcactgcaaccaatacacgatcaatttccggatcagtggtaaagaaatttgtcaaaggcactaaatcatgtgaatgtcgtctaaaaaagccaatctcaagctgtccattatattctcgcacaggaacttgggccttgttgcgataccctgtttgctcaggactaggcaaagtttgtcctacttcaatctcatctaaatgtgccttcttaagtaagttaacaacttgattacgcttgaattcaagttgcttatcatacttgatatgagctaaagaagcgagtcccgtttgaacccattgattcaacttgatcttaactcgatcaggactttctttttttatttcttcaattttagccaaagcaaagttcttcttaacctttaaaatctttgcactaaccacttcacctggaagtgcattagtaacaaatacggtcattccctcgtaatgggccacacccattgcttcatacgaaagatcggtaatttctaaatctataatttgattctttttcatactcactcaaccttaaaaaaatagctctctattattataatacttgaccaatctttgtgcttcaaaaaataatcgactgctttttagaaccaactatcacccatatacgcatgcaaaatgtggttagccgctactttcaacctcaaataattaatattattagaaaatagcataatcatacgcttggtcttgtaattcgcaacaaagcagcaattataaccagggatactgccattagcgcgaatgatgtcaccattaaaatacactccaccaaaataagctaccgtctgatgctgggcttggtggtaatactcgtttaccattttaggatttttcagcacatcgttatatacaaacttccaataatcaattggtgacatgaataagttccctgctccaaagtccgacgacgtcgtcactgtcacttggtgccagtcaacatttttactcattggctgagggatctcgttttggttaacctcagaaaaatccttaactttctggagcttaagtggcttagcaaaatcggtctgaatataagcattataacttaaattagtttgtttgctaataatagctgctagcaattcataatcaacatcttggtaatcccaagtatgaagatgatcattctccatgtgattaagcatataagctatttgctctttctgatttttaagcggagaagatggtcgagcattgttaaccaagccactagtatgattcatcagctcacgaattgtaatatctttactacctgaaacttgaggataatagttagataaagaggtattccaacctaataacttttcttgttgcagctgataaattgcagttcctgtcataattttttgtagcgaagcaatcggaaacaattgattagcgttaactatttggcttgaatcagtggtctccttattttggacaacaatcggttgcccctttttatcattaattaacattacaccgttgatatgatgaaacttcatataatcatgcagctgttctttctgattcttaatgccattatccagcttatcccctggctgcacaatgaataaaaatattgcaaaggcacaaagtgccaaaaagatggataaagctcgttttttatgcataaagattcctcttaattactatcccaagcaatgtaataactatatttcctcaattgtaaatctagtatctaaatagattcaactattgtgtgattttagagactgtaaaatagtttgtgtaaggatgaataattccttaaatttatttctttaaacattagaaaaaggagttcctttctcgtatgattggtttgaacaaaaaaacacatacagaaagaagaactccttcatgaatgattttaccaaagattttgctcaagctctattcaatccagacaaaataaatgatttattgcgcaaagagctacaacaggctgttaataacttgctagaagctgagttgactgcctttctaggctatgatccctatgccagaaatggctggaatactggcaattctagaaatggtgcttatttccgcaaggttgatacccagtttggaccaattgaagtgcaagtgcctcgagaccgcaacggtcagtttcatcagcacacgctgcctgactacaagcagcactctgatgttttggaaagcacgattatcaagctctactccaaaggcgtaactaccagagaaatcgctgacttgattgagaaaatgtatggcagtcattatagtccagctcaagtatcaaatatttccaagcagatgctccccaaggttgaggcttatcacaagcgcaagctaagcgacaagtttttctgtgtctatttggatgcgacataccttcctttgcgccgagaaacgtttgagcgtgaagcagtatatattgccattggcattaaacctaatggacataaggaagtcattgactactgcattgctcctagtgagaacattgaagtctggacagagatgcttcaaaacatgaagtccagaggcttgaagcaagttgaactctttctttctgatggtgttgttggcatgaaaacagccttggccaggacttatcctaaagctcattttcaacgctgcctggttcatgtcatgcgcaatatctgtgctaaagtccgggtggatgaccgcgaaaagatcatgaacgaattcaagcagatacatcaacagacaagcaaaaaagaagctgcagctgtcttgcacaaattctatgccagatggaataaagcttatagcaatgtcatcaaaggtttgaaggaaattgagcccgatctgctggtcttctacaattatcccaaacaaatcagagcttcaatttattcaaccaatatgattgaatcctttaacaacgtcatcaagcgtaaagctaagcctaaggcagaatttccaactgaacagtcgcttgatgcatttattggcatccaggcaatgagctacaatgaccgctatttcaaccgaattcataaaggctttggtcaggttcaggataccttagaatcctattttgattaaataaatgattaaaaaatcaatttacgagaaagaactatttacacaaaagatttgacagtttctgattttatgcaatgaaaaaacatgcttcattagaaacatgttttttcaagtcattttaataaaaacatgaacagcataattaccgcaataaatttcactgctcttatttcatgcactatactaaaaatagcttttctataaatacgtcacattcaaaaagattttgcttaaatctattgacagatatttttaatcttgctatcatattgctcaacaagaaacgaaaagtagcaactttgctcagcgttcagagaactggtggtagctgcaaaccaggcaggcaaagcttgacgaaatacatcgttataatgttgttcggaaaaattcagaaccgttaccatctgatagagattcaagttcttatgcttgaaagagtgggtggtaccacggctattgtcgtcccgttgactaataagtcaacgggattttttatttggaggaatataaaaatgaagaaaaagaaagtttcctttactgaatcaattattatcttaattgcactcctcactattctgggattggcagttatcaagcttgccctttctccagaagtgccagttttattcattgtccttttacttaccttttgggctagactgcgtggcttttcctggcaagatgttcaagatggcatcaaagaaggaattagtgtagccattattccgatttttatctttattttaatcggcgctttgatcgggatctggattaaagcgggaattatcccttccatcatggtcctgggtttccacttaatcagtggtagtttcttcgttccatctgtttttattgtttgttcaattattgggatggcaatcggtagtggttttaccacaatctcaactgttgggattgcgctttttgggatcggaactagtatgaaccttaatcctgccttagttgctggggcaattatctctggagctgtttttggcgataagatgtctcctttatccgattcaaccaacctttcttcagcagttgccgaaagtgaattattcgcccacattaaaaatatgatgtggtcaaccattcctgcttttgtagtttcattaattttattctggatcttaggcaacagtggcaacatggatccaactaagattgaacgtacttcacatattttacaaactaacttcagtatcagctggtgggcaattgtcccaattatcttgatgatcttttgtgcttggcgcaaaatttccgcaatccctacgctctttttaaacattgcgattactgtaatcatgatttttattcaaagtccccacgaatctattcaatcgcttaacaatttagttatgaacggctttgtggctaaaactagtgatgcttctgttaatgccttattaacccgtggtggtatttccaacatgatggctacagtagctttgatcatttctaccttatctttgggtgggatgctcatgaagttcaacattgttcaaagtgcaatggaaccactcgttaaacatttaaccaagcctggtcgtttaattacggtcaccattttatctggtatctgtatcaacctttttgttggtgaacaatacctatcagttatcttacctggtcgtgcatttaagccggcttttgataaaattaagctttcaccattagcccttagccgcgtacttgaagacggcggtagcgtaattaactacttaattccctggggtgttgccggttcattcgccgcttcaactttaggtgtgccagttttacatttcttaccattcgtcttcttcagtcttctttcaccaatcttctctattttgagcggaatcaccggaatcggcttgaagtgggctaaagaaaagtagaaaataatcatatcagtaaaaaagttcctaagaccatcgtctttaggaacttttttacgcaatctactagctaacggttgtgtcatgttgcaaccaattattactcttttcttgacattaccattcgatcattcacagcagctctttttggtatcactttataacctcgtcaaattcacttcaccagccttcatttttgggattgtctttaccgtaattaggaaaaatgaccagcaggcaaaattacctttaaaatcatatttttccgaccagtgggataataacttctttcctacttttgcttggactttattttatctcattgctatgcctaatctgcagcaacacgggcattttcacaatattgccacattcatctggcaattcttcagtgataatgccacacctcatctttggtacagcgtcatgatgctgcaatttttgcttatcatgcctggaatcaaatcagtctgcaactgggtccagcattcttatcgacgactactaatcgcagttattagttccggaattatttactttgcctggttaattttttatgatcacttcattttaaatggtcccgaggctacccattggtatttattagatcgtatctttatcagctttttgatctttgggctctacggtggcttaagctggaattttcatcatgaaattcaaacttttctgtttacatattggtggctaattgtgggattttaccttttaacctattttgggaccagagatttatttttagccactttcaaattaacagacctaaccaacgacagttattacctaccttcaatggcaatttatgctttagcggttatcctcttgatttacctaatctgtattgcacaaaaagtctttaatatgaactactggctaaaatcaattcactttctagctttttatgcttatcgagcatttttagccaatgttttttgggatcgtatcttttggcaatattttaattttaaacagctagctttacaaaatatttatttagctgtcttactactttggatttgtacatggtgtgcttcatatttatctgtttatgtagttcaccacctttggcttaaaattaatggttctgtcggtccatcctaatttgcgcacgtcgatattcctgactgtcacgcgtaggttgagcaactatatctgtaattattatttcatgatcatttcgttcaaagacgattgcttggtctaattccgcatttacttttttattgatagtggtatcttgattaaattttaaatcatccagctcccgatcaataaatgttttttgcgaactcgtcagctgatgatatttttctgccgcttctggagtaaaggacaagatcgtctcccgtctgaattcacctattttatctggatattcacttctttgaccacggatgtcattgtcaatatatcttttttccatcaaaatcacttcctttatatcttcactatacaggaggcgattttctttagacatctttctgcctactttagttttttcataagaaaaactttactattattcatttgaccactaaatacggtaaaatagataagacaagtaaataaaaggagtgtatatttcatggataacttttcaaatactccaggacggcgtcaagtccaggatatttctgcagttaacagcttcttgactaagatgtacagtctcatgattttggctgttttagtttctgcagcaactgcattcttgactacgactgtgtttgcatctgcaattgctaacatgtcacaagccgtttactggatcatcgtatttgttccaattgttttatgtatgacaatcagctttaaggcagcaaagaacccaacattaggcatcgttcttctgttgattctttccgcagtctacggcttcgaatttgcctttatcgcaggagcatttacttccgcttcaatcgctggtgcctttttatcagcagctggcgtgttcgcagcaatggccgtcttcggttctgtaactaagcgcgacttgagcaactggggttcataccttggcgcagctttgatcgggttcttagttgcatggctcgttaacgccttcttcattagaagtggcgctgcagcctttatcttctcctgcatcggtgtgttaatcttcactggcttaactgcctacgacgcacacaatgctaagaagattttcatgacctacggcggtcaagtttcagatactggtttagccgttatgggggctttaagcatgtatctcgacttcatcaacatcttcatgttcttgctacaaatctttggcatgggcggagatcgcgattaattaatttccatacaaacatagcgttgattagcttttacactagtcaacgctatttgttttgcttaaattttatccaccaacataaaattcgatatgttgttgtaaattgttgaattcaactggacaataaccaccaatttcgccatcaaggttaactggcaaatcttgtccttcacttttaccaatcaattccgccttcaagctgcgggtcttggtataaatgatatttggatcatcaacgtgcttaccattcaaagccaatgccatcaacttcatcatgctaacagggtcagaaggcttgaccacgatcaattggaataatccatcactaagctgtgcatcaggcataacttgctcaaaaccaccaattgaattagtcattcctagtaggaacattgataattttccttcataaacgccatcatcataagtcaaacgcatctcattctcagtcaagtgtggcaacatttctgcccccttgattaagtatgcggcataacccaaagctgacttaacctcagatggtacgccatatgttaactcagttaaagaaccgctggcagcaatattaacaaaatattgaacctggtcaccaaaaacagctttaccgatatccattttacgagttttattctttaagattactttagcagcatctggaatattatcacgtggaatggctaatgcacgagcataatcattagtagtaccagcaggaataattgccattttaggcctgttttctaaaaaggcaatcccgttaactacttcattgattgtaccgtccccgccagctgctacgattaaatcaaaaccttccttagcagcacgagtagcttcattgcgagcactattttctttaggtgtagttctaaaagcactagcttcgtagcctgcttgttctaatacatctaaaatatcggccacattctttggcatctgttcgtgacctgatacaggattataaattaatcttgcttttctagtcataattactacctaacgttctaaaaattaacgactttgcaattcttggttaagtaacttgttaaccatcttagggttagccttaccacgagtttgcttcatgatttgaccaactaagaagccgattgcacgatccttaccattcttaaagtcttcaactgattgagggttatcatcaacaaccttcttaaccattggagctaaaacagaagtatctgacaattgaaccataccattatcttcaacatacttcttaggatcagtaccattttcaatggtttcagcgaagaccttcttagcaatcttagatgaaatagtaccatccttaattaacttgatcatttctgccaagtgttcaggcgttaacttaatatccttcaattcaacacggtgatcgttcaagtaaccattaacttgtgtgttcatccagttagctgccagagttggatctgcacctgccgcaacagcttcatcaaagaagtcagaactttccttagtttgaagcaaaacgttagcgtcatatggcttcaaaccatatttatttacatagtcatcgtaacgagcaaatggcccctttggtaattccttagcaatttcatcgatccattcttgtgaaatatgatctggtgcaatatctggttctgggaagtaacggtaatccgatgcaccttccttaacacgttccaaaacagtcttaccagttgcttcatcaaaacgacgagttgaaagttggatgtgaccaccagccaaaagaacttgttcttgacgcttttcttcatatgcaagtgaacgacgtacgtgatcaaatgagttcaagttcttcatttcaaccttagtaccaagttccttttgacctgcaggacggatagaaatgttggtatcaacacgcattgaaccttcttccatcttaacgtctgaagcaccagtaaattgaacaatcttacgtaatttttcaaggtatgcgtaagcttcttcggggtcttccatgtcaggttcagaaacaacttcaagcagtggaacaccttgacggttcaagtcaacgtatgagaaaccgttggttccgtgagtgttcttaccggcatcttcttcgatgtgcatttcgtggataccgattctcttcttcttaccgcgaacttcaacttcgatgtaaccatcacgagcaagtggttggaagaactgagtaatctggtaagccttggggttatcaggatagaagtagttcttacgatcaaaatgagtagttggcaaaatgtgagcgtgggttgctaaggcaaccataatacctaaacggtaaacattcttgttaaccattggcaaggtaccaggcatagcccagtcaataacattagtctccgtgttttgttcagcaccataggttactggtgaaggagagaaaatcttgctctttgtctttaattcgaagtggacttcaagtccgatagtcgatttaaaattcattcaattagtcctccattccagttggtgttttttcataaaacttgttagtgcgttcgataaagtcagcagtcttgaagacattaccttcatcaaaacgcttagccataacttgtaaaccgacaggcatcccatcaactaaaccagctggaacactagctgcaggaatacctgctaagttggcagaaatagttaaaatatcattgttgtacatcttaattgggtctgaaacttcttcgccaataccaaatgctggctcagtagtagttggtccaacaattacatcattttctgcaaagatcttgtcaaagtcatcacagatcaaggttctaaccttagcagcttgtctaaagaaacggtcatatgaaccagctgaaagggcaaatgaaccaagcataattctacgcttaacttcagcaccaaagccttcagaacgtgatttaacgtaaacatcaagtaagttcttagtgtccttagcacggtagccgtaacgaataccatcgtatctttgcaagtttgaagaagcttcacttgaagcaatgatgtagtagtcaggaacaacgtatttagtatgtggcaatgaaacctcattgatcactgcaccagcatccttcaaagcatcgatttgcttttgaataacttcacgcatttcgccgctaactgcttccatgtattccttaggaacagctacacggagacccttaacatcttgaccgataaacttggtaaagtcaggtacttcacgggttgaaacagttgagtcatgctcatctgcaccagcaattacgtttaatacttcagctgaatccttaacgcgcttagtcattacaccaatttgatcaagtgaagaaccaaatgcgataagaccccaacgtgatacacgaccgtaagttggcttaataccaaaaataccgttaaatgcggctggttgacgaattgaaccaccagtatctgaaccaagtgctgctacaacttgaccactagcaactgcagctgctgaaccaccagatgaaccaccaggaactttatctaaattccatgggttgtgagtagcaccataatatgagtgttcagttgatgaacccatggcaaattcatccatgttggttttacctacaaaggttgcaccagcttttttaagcttagaaataactgttgcatcatacattggcatgtagttgtacaaaatgtgactagcagcagttgtcttaatcccgttagtgatgatgttatccttaattgcgattggaatacctgctaacttactcttggagtagtcaaggttatctgcaggcttagcatcatctaaaacagtgatccaagcatttaacttcttatctgtatccttaatgtttgccacagtgtctttagctaacttatctgctgacaagtcaccgctggcaagctttttgtttaatgaatcaatattttcgtttaagtaattcattactcgtcctcatccttattaataattacaggaaccttaatgtagccgtttgccttttcaggaacgttagccatcaatgtttctctgtcttgtccttgccagtgttcaggtttatcttctctgaagacagtatcacgatcaacaacttgaactgtttcatcaacaccctcagtatcaacttcactaagttgatcagccatattgataattgatcccatttgatcagtaaatttatctaattcttcttcattaaacgcaagtcgcgaaagagtcgcaacgtgtttaatggtatcttttgtgatttccacgcaaatacctcctattcgccgccataaacatggacttgataatcactatcgccggtttcttttgcaactaaagcttgtacatcatctactgaaccaattttgatttcaattgggatattgccagacaagtactttttagctgacgacaaaaccaaacgggtaaaactttgaatttgttcatagccataaaattgcgttgttacggaaatgttttcttgtgaaagcttaccgtttgtataacgcaaagttgccgttaccccactaatattagggaagtagttttgaatagccgtcttgaaatcattgaagtgcgatgcatcatcactgttaattgctttttcactaccagttgtcggtaaaacttgcattttttccgacatggatttccatttagatattttactactattagcggccgctgtcccgtaagcgaagtaagttccaccaactaatgaatcttttccagtcttggagaataaaccaatcgtaatcggaatattctttaaagctttcttcttacgcaagcgagcaacaatttcattagctattttttcaccttgagctttttgttcagcacgtgaaatagtagtttgaaattctgcaccgttacgctttttctgataataatcaaccgaattcatggctaagcccaagctcataccacctaaattatacttggaaccagatccagtcaaataatcttgttcgataatttcttccaaataaattggattacgcgtatcggttccggtcttaccattatttactgggtttaaaccatcaggatttgatttggatttacgcattaaccaatcagttacagttgaggtatccaaatattgtccttcttggaagacgtattgattaggcgaaaattgattcttagaaatttgaatcagccctcgctctaattcacgcgtatcaacagaattatcattatcagtagctgttaatcctgcaatcggactaatattatagcgaccatttttcattaaaacggtatagccattcgttcccgtgttagtagtttgatagctttttttcttagtggttgaagtggttgtcgcattatttgctaaactagaatccttcaacttaccacaaccacttagagtaagcgcgattccagctaaagccattacttgcaaatattttttcacaataattgtcctttattcaatttgtgcaattgcttcttcttcagtcaaaagtggtacgcctaaagtctgcgctttagtatacttagaaccagcatctttgccataaatcacgtaatcggtcttatgcgaaactgaacccgtaactttggcacctaaagcttgtaattttttcgtaaactcacttctagtataatgctctaatttacctgttagcactacagtcttatccttaaatggattatcttcaatttctgcaggctcatctgcacctaagtaatccatattcaggccgctctcacgcagctcatcaattaccttctgtgcttctggttgagcaaaatatgttgtcattgattccgcgatcgtcatgcctattgtatcgatagaagctatttcttgcacgtctagagacataatctttgccagatttttaaacttttgagcaattaagcgtgctgctttggccccaacatggtcaattcccaatccagtaatcaataattcaactgagttttgctttgaattgtctaaggcagttaacaaattattgatcgatttttccttaaaatgatcgagttgtgctaaatcatctgcagttaagtgataaagatcagccacattatgcactaaatctttagcaatcaattgtttaacgatctttggccccaaaccggcaatgttcatagctggtcgagaagcaaagtgcgtaataccctcctcaacttgagctggacaagatggattgatgcagcgcaaagctacttcatcttctaggtgaactaatttttgcccacaggatggacaagtcgttggaatctgataagctacagaatctgccggtcttttagccatgacgacttcagagatttctggaataatatcgcctgctttatgcagtttaacggtatcaccaatcctgacgcccttttcattcaaataatctgggttgtgcaatgaagccctagctacagttgtaccagctagttgcaccggatccatgaccgcagttggagtaactactccggtacggccgacagtccaaacgatatcccgcactacagtttcttgttcttcaggtggaaatttataagcaatttcccagcgaggcaccttaacagtgttaccgagctcttgttcaattcctagatcatcaatttttaacacaatgccatcaataccatatgttaggctgtttcgtttagctgtgtattcatcgataaaggcaaaaacttcatctaatgtttttaacttacgaccggtttcattggtatgaaagcctaaatcatgcattttttgaattgcttggtgctgactagtaatttcttcaggcggattaacccaagtataaataaaggtactaagttgacgcttcttggtaactttaggatcaagttgacgcaaagaacccgctgcagcattacgtggattagcaaaaactactagaccttgctcttctctttctgcattcaacttggcaaaggcttccttgcccatgtaacattcaccgcgcacttcagttgttaacggttcaggcaaagtctgtggaatatcactaatatacttagcattagctgttacatcttcaccaacataaccgttaccccgcgttgaggcacgaaccaacttaccattttcatattcaagcgatagtgataagccatcgatctttaattccacgttatattcaactggatgaccaactaatttttgcatccgttgatcaaaatccttcagttcagctttggaaaagacgtcccccattgacagcattggaatcgggtgctctaccttggtaaaatcactatcaatctgtcccccaactctttgggtaatggagtcgggtgtcacaatctctggaaattctttttctaattcaagcaagcggttgtagctttggtcgtaaacattgtcttcaacctcaggcgcgtccttagagtaataggcctcagcccattcattaagctgttttctaagtgaagccgcttcttttttagcttcatcaagagtaatttctgccatttttccctcctgatccaaatcaatctttctttaattatatcttcttaattggcgcaaaggcagccaaaagccgtttgattcctttaccagggaaagcaatatccagctccatatcttcaccagtgccattaactttagttacaacaccatgtccccaagctttatgctcgacttggtcgcctacattccagcccttcttttcagcaccgacagcgcctgaagctttcttagcagtataaacttcagcgcgagctcgttcggctttgcgagcaaatggtgccgtctgtttctcaaagctagattggataaagctgctttgtaatttttcattttcttctttgtgcagatcctgttcatcaatttcgtccaagaatcttgaaggcggattattttgcattctgccatacatcatccgtgagtaagcattagttaaaaacagttcttgcttagcccgagtaattcccacgtaagctaggcgccgctcttcttctaattcattgtcatccatcattgcacgttgcaacgggaaaagcccatcttccatgccaattaagaaaaccactgggaattctagtcccttagctgcatgtaaagtcattaaagctacttgattgtcatcttcatcaagatcatcttgatcgctaagtagagatacttcagccaagaagtcgcttaatggattagactcatcttcttcgggctcataatgatcatcaaaacgcttagtaactgacaagaattcatccaagttttctaaacgcgtttctgattcaattgtattttcagctcgcaaggcatcggtataatcaaaatcagctaagattttttcggttaaaccggttactgtaccattttgagcataagcaattgcatcacgtaatttagtaccaaaatcgcttaatttcttggctgctctagtattaattgaactttcagccacatgtcccatcgcatccaaaatgttgtagtgattctcatccgcaaatgttaacaacttatccacagtagcggcaccaattccccgctttggagtattaataattcggttcatactcatcgtatcagctggattagcaactaacttcaagtaagccatcacatctttaatttctttgcggtcatagaatttatgtccaccaacgatttgataaggaatattgcttttaacgaaagcttcttcgactgttctagactgagcattagtccgataaagaattgcgaaatctttgtaagcccgttttttatctttaacttcttcttggatctttgaaatgatgtagtgagcttcatcatcaccgctttgggcttgatagtaggttaccttttgcccatcaccttgatcagtccacaagttcttagccttccggttctggttatttttgatgaccgagttagctgcggacaaaatgtgaccagtagaccggtaattttgttctagcttcacagtcttaacatcatatttcttgtaatcctgctcaaaattcatgatgttttccatattagcaccgcgccagccatagattgactgatcggcatccccaactacacaaatattcttgtattgtgcagccaaagcatgacagagttcatattgagcctggttagtatcctgatactcgtcaactaaaagataacggaacttgttttgataatagtgcaaaacttcgctatcttttttaaacaaaactagggtctgcataatcaaatcatcaaagtccataatttgatcacggcgcaatctacgttgatattcttcatacaccttagccgccatcttctcaaatggtgacaatgcactctgcataaaagcttcaggatccagcaagtcattcttgccattagaaatcgcggctaaaataccgcgtggatcatacatcttaggattgatattcaagtctttttcaatatgcttaaccaaagttaattgctcggccgaatcagcaattgaaaaattatgaccataaccaatcttatctgcatcccgacgcaagatccgcacacacaaagcgtggaaagtcgacatccaaatgtcgttagctgctggtcccagcaacttttgttcacgctcacgcatttcactagccgccttattggtgaaggtaatggctaaaatattccaaggtgcaacatgattttcttcaactaaataggcaattcgtctcgttaaaacagaagtcttacctgaacccgcaccagcaacgactaataaaggtccttcagtggtttctaccgcttctttttgttgcggattcagaccagctaagatagatttttcgctcattattttccccttcactaaaaattatttcattaatgcaacttgaatattataccaaaaaagcagcgactaattcgctgctttagatttacttatcatatttttcaagatcaaactgttcaatcaaattaatcagcttatcggcatagtccggatcagtcgcatagccgtcggtaaccaaggctttagcttgtgtcttataatctttggatgctagaacatgcttatactgatcgtggttccacgttgtcccattctggaataatctagcgtgagcccgaatagaagcctcatatgagtcatatatttggaaacgcgccttcacggtaacccacttattctttacatattccttagttgtcatcactgccgaagtgttcgggttggatcctttaacaccaaaaagattgttgtatttttgcgacaaatcactttgtccataattactttctaggcaggcttgagcaatcgtgatgcttggcaataagtcatacgacttgtccacttcgcgcgcaatcggaccaatttttttgataaagtcttttttctgttttaatagttttgctgcttcctgttctttttgcagctgtgcttgttgaatctgctctgattgaatcgcgtaacgcctataatatctaaagccgacaaaagcaaccatcagaataaatagaattacgaatacacgcacaacggttttgacactttttggtactcttgatttacgttttcttgccatagttttattccctttaattactaattaaagtataaccgatttttgagtaaaaaaaaagaagtcgctcactgcgactcctcaatcagtgcgggcgagaagactcgaacttccacgatctaaagcgatcacaagatccttagtcttgcgcgtctgccattccgccacgcccgcggcacatcaactataatagcctaaatacagttgagatgcaagaaaaaatataaattattttaaatttctgatcattttacgcaaaagtttgcgctaaacgcaggtgtcccctacatttaccacaacgatacttttgtgtattaatcctgcgcattcttgggtatctcaacccacagttttcacaaagatataggtaacgatattttttctttttacgtaagccaatatcaggtgcataacgactgcctccaacttttttcagcaagattttaaaattgcgatcacggtgtcggtaacccaagcccaataaatgcaaatgatagtgggttaattcatgcttaatgattcctactagataatcatgatattgtggtactaaaaaatgcgcgttgatttcaagatggtgatcatccaaatgataacgcccacctgttgtggtcattcgccgattaatttttacaaggtgcttaaaagggcgatcaaaatattttaacgaaattttttcaactaaattttgtaattcattctcattcatggataaaattttattccaaaaataaaaatcagcaagaatttaatctcgctgattttttgctacctaaatatcttggcatacatccccgcctgcttaggcgtactaatgtgtcgtttcaagaaagttactaagtcatgtttgaatgactttttaccatccatccaggttccagtgaataagtgaatcgatttggagtccttagaaggattacacagaactccatctgaatagacatgaatgccatcttttaacacttgctcctgattacctagctttaagccatacttatttaccagcatttcagtaacggaaatactatttactcccgccatctgattcttagtgtcatattcaaaatcacgatcttgataataatccaaaatatcctgcataaatgggtggcctttttctgcaccaaaaattgcagctgacagataatcatggttttcaaaaccaataaaggcagaagcattcaaaagactatctaacttatccacgactctaacatcagtatctaaatatatcccaccttgttcataaatagcccgtgctcgaacatagtctgacacgaaggcccatttttttgcagcataagcttgttcaatataacgattctcatgcatatcaaaattatcttcattccactcaataatttgataatcaggcaattttttcttccaggttgcaatacattcttcaattatcggggatttaggattgtgtcctacccaaacataatgaatttttttaggaatcatttttaacctcgcttcaaaaagttcttaattagcttcacaatatcatcattaaaatcaagcttgaacaagaacatcaatgtcagataaataattaacatgacaattgacttaaaagccatatcgaaaaaggcagatggaattatattaggcataaacattccaatagccaaggttagcaccgcaattaacaaatacttgggcacgtcatggaaaacataactaaattcatagccatcacgtacaacccagagccgcaaaattaaaactactgcttcagtaattaatattgcaatcatagccccacctgcgccatatggcctatctaagagataactcaagacaatttctaaaattgccccaataactactggcacagcataatccttgtctcgctggttagccaaagcaaattggttagcaaataccccgccagtcggaatcatgataattgttaaggtaaaccaaaacattaatggagtcatcggaacatatttattcccaaagaaaaatggtacaaactgtttggtatttgccataataattacggcgaacaaggtacccagcattacagtagcttccagtgattttttcatcactatcttttgtgccttttttccttcgctcgccatcttaggcataatgactagcgaaatactggtaattacacccagaatcatatttgaaattcgttgtgaattgtcataaaaagaaacctgagtcgaattagaaaaccaacccaaaattggtttatccagcgaagtataaatttgagtcgcaatctgtggaatcatcaaagtaccaattgcaattgccgtctgtttaaatttgtaaaaatgagcaatgggttttcctacatagcgccaaatatcaaaccaaaagacaaaggaacctagcattgtcgacactgacatgatcaataaatatttccacaagtcagcgggtgattttacccataataaaattagaaccacactaactaactttaccgccgtgtttttcaaaacaacacgaccaaagtcagctagtccttgaaagaaccatgaaatatcaacctgtgctgagatcaagtatggcaccatcaacaagatataaaaccaatattgaacgtgaaatacagtcgctacaaaaaccgtgactaaaatggtgataataccggcgattccttggaaataccataacccccagaaagcattggttagctcctgcggtgtaccataagtgcgcgtccgtgaaattgttcgcatccctacatacgacacagacagaatacaaaaaatcatcaagaattgcaccgtattgttcacactgctataaatcccataagtcttaggacctaagacacgcgataaatacggtacagtaatcagtggcaccaatacaataaaaatctgataaaccgcattatataagatgtttaaaaatgttttacgcattttaacctcgatattcctgcgtcatgtacttaaagacgttctcacaatatgaatcaccatgcacctggttagtcaaatgtagccagtaaagacggcgattagcaatctgctggttatcaagttgatccagattgcgaattagttcatcctctgaattaacacagattccgggagtaatctcagcatatggtcccattagtaatccgcgcgttttttcatattgctctaaaaagttagtcacaaacacaatcggtttgttcaagtgcaagtaatcaaagtagattgacgaaaagtctgtcatcaagaaatcagtatcaccgagcaattcgtacaaatcataattgtggtcaaacaagtaatcattgttcatgaaagcaatgttagaataactgctcttgaaattggcaaataaacgcatttcatagggatgcaattttacaatcagatattgatgccgcttctttaattctgtatttaatttttcaacatcaaaatcccgaaaggcaaaaaagtttctctctttgattttctccataatggatttatcttccaattcataacgaaaagttggcatatagatcccgatctgtgcctgatcgtcctcagttttaaataagtcagccaacaattgtttcttcgaaattaccggcttagccaataaatccaaacgcggaaagcccagcttgcggtatttttttgtctcaattgccatacaagcactcattagtgattcatatagatcagagctagaagcaacaatatccgcattcttgtgccacaatttttcgttacggcgattgtcgcgtcgcttagtattattagccataattcccatgcgcttgagtggaacgccatgccacaactggacattaatttgatgcttgcgcaccttaaatggttggtgcgttgtaattacatatcgcgctgctccgattttctgccaggttttccacttcaagtgtgacgatggccacggctcaactaatgtaacgttatattcaggatgattcaattgcagccacttgtaaaaagcatagccgttagatccagacctacctgaaccattcaggataaccacattattgttttccatcgtggtaaatctagccaaaaaactcatccaagccaaataaagacggaataaaaagcttttcattaaaatacttccttaaaatagtctaatacctaaagcatataaaaaaagcttgagcaaactcaagcttttttctttatttttgttaaactttattctttacccatttttctctggcagaatttaacaatttcaacaatcaaaaccatcaaaattccggcaattaaaatgactaaccactgtggtccatcaagttcagtcacatcaaagaacttagtcataaatggcaattctaccgctgccataattacagcagcaatgataattgcaccattgaaccacttgttagaaaaagtatgcggtctaaaaatcgactgatgtacatacttggaattaattgcatggaacagctgaatcaagcccaaagtcaagaaggccattgtcaatgcatccccatgttgcaacgatggatcacccacatgtggaccgacatgcaaaccaatttggtatgcacctaaaactaaaattccttccaaaattccttggtaaataattgaactggcaacaccaccgctaaagaagttagacttcttaccacgcggcttgcgcttcataattccaacttccactggttcaacacctaaagcaatagctggcaaagtatccgttaccaagttgatccacaagagctgcacaggagctaagatatcccaacctagcattgtcatcatgaaaactgttaatacttcacccacgttacaactcattaaatatagaatggccttttggatattactgaagaccttgcgtccttgctttactgcttcaacgatcgtggcaaagttatcatcagccaaaaccatatcgctggctcctttagaaacttcggtcccagtaattcccatgccgattccgatatcagcttgcttcaaacttggagcatcgtttaccccatcaccagtcattgcaacaatcttgtcattagcctgccaagccttgacaattctaaccttgtgctctggtgaaacacgagcgtaaacgctgtagtcaccaacatgctgtttgaaatattcatcatctagtttatcaagttcagccccagttaaaacgcggctatcctgacctttttcaataatacctaggcgttccgcaattgcttgagcagttgtttggtgatcaccagtaatcattactgttctaataccagcactctttgcttcagccacggccgctttagcttcaccacgttctggatcaatcattccgactaacccagcaaaaattaaatcttgttcaacattatcagttgttggatcggtgtacaattggtcgactttcttataagcaagccctaagacacgtaaagcttgttgcgccatctgcttgttttgcgctaaaatattttgcttctgcttatctgtgatcggctctacttgaccaccattttcaatcctagttactcgctgtaacaacatatctggtgcgcctttgaccgctacaaagtattgctcgccatctttattaacagtactcatcaatttccgttctgaatcaaaaggcacttcttgaatccgtttgtatttttcaagcaagtcagttacatcaatgttttgatcaaaagcaaattgaatcagggcggtctctgttgggtcacccaataagtctccgccattttcaatcttagtatcattagccaaagtcattgccaataaagctgggttattttcgctaatactttcactattatcatgtaactttttatcatagaagaccttttcaactgtcatccggttctgggtcaacgtaccagtcttatcagaacaaataatgtctgtagcacccaatgtctcaacagcaggcaatttacggacaatcgccttatgtttggccatcgtttgcgtacctagtgccaaaataatcgttacaattgctggcaagccttccggaattgcagctacagccaaggaaacggcaaccaagaacatgttaatcattaaagtagagttacgctctgctgaatcagccttgagcactcctacgataaagacaataacgcagattgccaaaatcatgatggttagggtctttcccagttgattcaagtttcgctttaacggtgtatcagtttcatcagcattgttcaacattgtagcgattttaccaacttcggtgtgcattcccgtactagttacgattccttcaccacgaccataggtcacattagtattggaataagccatatttacgcggtcagctaaagcaatgtcttcaccttctaaagtttctgcatgcttttcaactggaactgattcaccggttaacgctgattcctcaatcttcaagctgtgggcttgattcaagcgtaagtcagcaggaaccacatccccagcttctagtaaaactacatctccaggaaccaattctgtgcttggaatagtaacgattgtatcatcacggcgcacatgcgcatccggcgtagccatttccttcaaagcatcaatcgcagcttcggaacgtgcttcttgaaagacacctaaaattgcgttcaaaatgaccacaatcataataattgcggcatcagtccactcatgagctaataccccagacaaaatcgcggcaatgatcaaaacaataatcataaagtctttgaattgatcaataaaacgcatgaacatgctttgctttttcttggaagctaaggctttcggaccatattgctctaatctagctttggcatcactagcacttaacccatccttaacggacgtgttaagatctttttcaatgtcggggatcgactcgacataatattttttcgccattttccctctgctatataaaacatagaaacatgcagaagtttgatattttccacataccagaaaaaaatatatttttcctttcctaattttatttactgtcgtcatcattggtattccgatattccatctggggagtaatcgcattgaccaactcctgcagcttaagggcttagccagccccattattttttattttgttaatgccaataaatttaatactgcattgtcatcacgatcattgctatagccacactcataacaaacatattcattgtgcttggtgccatgttttctattgccctgcaaagtgattttgtctgcaccatttttgacatagccgcaactggcacatctttgcgttgacgggtagcttctatcagccaaaattagctctttatcataccaagcacatttataggataatatctgtctaaatttgccaaacaaggacctctgtatgcctttggaagccacatgcgtcatcatcatttgcttgacattcaagtcttcaatgacgatttggtcataattatttgccagctcagtagtaaatttttgcaaaagatcattctgaatattgacagccctgcgataatcacgctgaagcttggttctcacttgcacgtaattattgcttcggccagccaattttccattaacccttcttttcttggccaatattctctgataatgcttgatccgcttgtacagtttctgcagtcttgccggcaaaatattgattctgccctcagtatagctgaagtgcccaacgttgacatcgatggcggtctttttgccagttttaacctttattccagctttttcttcgtaggaaagagcagcgtaataatggcctctttctctaaagatgctggcaattttaacctgtttcatcctcaatgcttcatatgttggaatatcaaaccatgatttaattcctctgggcttatccagtctgagcttgccattaataactttagctcggtcagtcttaaaaccttgacgtggagctttctttgacttgaaatgcggcttgccccagtcgagctgggctttgtcaaaaaagctcttccaagcgttggccaagtccttgactgccaactgcagacaacgagcagacaaggtaaactgccaatcagccttgttattgactaattcatctcgcacccgacactcattaggactaggattattatccttatttaaagtccgtgcttcatacatatcttgccaggtttctaaggctagattccagcagtatctgcggtaatcgcatagacggtcaagttctctttgcatggtcttgtttggttttagctcagctacctgtgttttaatcatttatttcacctccaatgcaaacataagtttagcaaaggatgaaacaaaaacaagcgaacaaaatattaaatttttagcagcagctaatttgtttctatgttttatcttcctgatcaaattaactgcatctttttctatttattgctatcaaatcctatcttttagtcaatcattatttcctcctcaaaaataaaaaagagacttacatgcttgtagcacataagtctcacgaattaagataaatccagaagtatcttacttcggctgttggattcatcgcaagcaattgctgttactcccttatgacaagttaattataagcaaaattttagctatctacaagttttagcgaattgcttttactttttataaaagtcatcaaagacagtaactggcaaatgacgcttgtgtttactcttattccataatttttcaatttgatcagctgttttatctgatacttccttaccttcaaggtaatcatcaatctcttggtaagttacaccgagggcaacttcatctggcaaatctggcttttcttcttcaaggtctgcggttggagccttttcatataaatgcttaggacaacctaattccttaagcaaagccttgccttgacgcttgtccaaacggaacaatggcgtcaaatcagcggcaccatcaccaaacttagtgtaaaagccactaaagttttctgcagcatggtcggtaccaacaacggcacccttattagcaccagcgatggcatattgaactaccattctttgccgcgccttaatattgcctttgttaaagtcagtaatcttttgaccagttgcttctacaaccttcaccatagcatcaactggttccttaatattaacaattaaatcctgatctggcttttgaaaagcgactgcatctgcagcatcttgggcatctgcttgaacgccataaggcaaacgaacagcgataaattgataagaatcatcgccagtttcctcacgcatttcttcaattgccatttgacacaatttaccagtcaaagtggaatcttgaccaccagaaatacctaagacgtatgacttaagaaatggattagcctttaaataatctttcaaaaaatcaattgaacgtctaatttcttttttagggtcaatttctggtaaaacatgttcataagcgataatttctttttgtaattctctcatcgaccaatgcttctttctctaattttacgccgaatgtcttgaatcaaatccatcttggattcgtataagttttgtgataaatccactggatattcctgcggattcaggctacgcttatattcatcccataaaccatcaaggttgtcagcacagaattttttaatttcatcaagactaggttgatcataaactaattttccatctttaaaaatatcatgtaaaagtggaatagcagtgtaatcagttaccaccttattaatatagttatattgtgggtggaacatgaagagcgcgtcaaatttgcgtggatcttcattataccgagatacccagtcaccttcatttttcttagcagtgtttgcgctaatccgccatacttgttttttacctggggtggaaactttgatggcatttgaagaaatcttcaatgtatcccgcatggcgcctaattcatcttccatggcaaccaacttgtaaacagcaccaagggctggttgatcataagcagtgatatacttggtcccaatgccccagacatcaattttagcgccttgcatctttaagttagtaatggtgttttcatcaaggtcatttgaagcaaaaatcttggcatctggatagccagcatcgtctaactccttacgaacttgcttagaaatgtaagccatgtccccagagtcaattcgtacgcccaagaagttaatcttgtcgcccatttcattagccaccttgatagcattaggcacaccactacggacagtatcgtaagtgtcaaccaaaaaaacacaattcttatgtgtttccgcatatgccttaaatgcgtcatattcactgccaaatgcttcaactaaagcatgagcatgagtccctgaaataggaataccaaacaatttaccagcacgaacattactagttgaatcaaagccgccaatataagcagctcgagcaccccaaatggccgcatcggtttcttgcgcacgacgagagccaaactccattagaccatcatctttaacagctaacttgattctagcagctttagttgccaataaagtttggaagttaataatatttaaaatagcagtttcaactaactgacactgggcaagtggaccttcaacttgcaaaattggctcgttagcaaaaaccagctcgccttccttcattgaacgaatagtgagctttaattttagattgcgtaaataatcaataaagtcatcatcgtaaccttcattttctttcaaatattgcaggtcactttcggtaaactttaaattctttaaatagttaatgatgtgttccaaaccagcataaacagcataaccgttgccgaatggttccctgcggtaaaaactttcaaaaacggcattgcgatcagcaatccctttcttgaaataggtatacatcatattaatttcgtataaatcagtgtgtaaagccaacgaatcgtctttggctaattctggataaaacattgcttctctttctgtcattaaaaattaacaatttcgtttttcattatacagccattacagtccattggctattctcaaaactatttttacctcaaaattagatacactttttcaattgagtccagttgatttttaatagaaaaatgctcttccgcataccgcttttctgtattagccatctggcgtaactcttcatgggttttattaacggccagattaatctctttagcaattgaatcaatgtctcccgttttagcaatgaaaccatattcgggtcctggaatcattttatgaatatcacctacatctgtggacaaaatagggattaaattgtctgttgcctctaaaagcacaagtggaaaactctctgaatatgaagttaagacggctagatcaattcgcttatataatccgctcaattggtgttgagtcataaaaccgtgaaaagttacttgtggtgccatgtccaattgccgcgtcaaggccttcaatgcttcaagctgactaccatcacccgcgatatgcagacgaatatgctgatcatctaattttttcacagcttttaagagcaattcttgtcctttaaccttttccgtacgagcaacgttaataatattaaaataggtatgttcatatttagctggaatttcactatcactgtggaaaaagatgccattatagatgacatgtaccttgtttttatccacatgtgcgcgattaattagtagcttggcaaaacgctgagttactacgaaaatacaatcagcttttctcaacgcacgtaaattaagtttagtaaaaatattgccaatgattcccctaccttcaaagtctagataaggatctgaatgtacagtaatacaccaagttgcacgaattcgcttgtgaatcaaagataaaaataagttggcacgcgcaccatgagtatgcacaatatcatagtgcccctcattgataaacttagtcagtctacctaaactgcctaagtcataacgactattagctcctagcacatgtgtagtaatcccagccgctcttgctgcttgtgctactggtccttctgccagcgttaataattcaaaatctttgccttcatttttggcttcagttagcaaattaacaatatgtgataaaccgccgccattttctaaaccagcatttacatgcaaaaccttcatcttagtaaaattattttcccttcttttttgactgtttaactcgcacaacaaactgtggcaaaactaacatccgcttaaatctgctaggattagtaatcaagcgataaaaccactctaaatgcgtcttttgaaaagcttctggtgctcttttaacgatacctgaaaagacatcaaaactgccacccacacccatcatcaaagctggtgtttcgttcttacgtaagattgataatagtttttcttgcttaggaaaacctaatgctgcaaaaaccatatcgggttgtgccttctgaatgcgccgtgccactagttccaaatcttcagtaaagtagccgtcttctgcaccaactagattaatatttgagtattccttagcaattttgctttgtactgcatgaattacttgtggcttagctccaattaagtaaactcggctaccacgatcgctagcaacatccatcagccaagtaaacaaatcatatccagtcacccgctcaggtaacggctgcttaagcattttagctgcttttacaatgccaatcccgtcagcagtaatataatcgggatcattttttagaattttcataaattcaggattctcgtttgccgccatcacaatctccggattagcggtcacaataaaggtcgacaggtgattatttagtcgattaataaattcattttggaattggttaaaagttttattatcaaaatcaacacctaaaatattaactttgctcattttcacacctcatgcgttttcttatctagtttctattctaccattccgacacgcaagtacgagaaacatgttcaagttttatattttattcaaacatgataagattgttttaataaaggagaaaaaatgaaaagagttattacctatggcacctttgacctacttcactacggtcacgtgcgactgcttaaaagagctaaagaattgggcgactatttaatagtaggtttatctaccgatgaatttaatgaattcaaaaaacacaaggaagcctacaatacctaccctgaacgtaaatacattttggaagctatccgttatgtcgaccaagtcatccccgaaaaggattgggatcaaaaaatcaccgatgtacaaaaataccatatcgacacttttgtcatgggcgatgattggaaaggaaaattcgacttccttaagccttattgtgatgtggtttacctgccaagaacgccaggaatttccactactaaaattaaagaagatcttaaataaaaaaatactccaattccattcaatttgaatgagattggagtttttgtttacttagaaaaagtgaattcaaatcgttctgcaacgtaacgtgcgcgggtgtattcgaatggttgcccatctgctagttcagttacctgtcgtctagtaattaacggttcaccttttttagctttaagaagacgcgcatcttgctcgttggcaattgatgcagaaatatgttccgtcactcgtccaatggcaaaaccaccgcgcttttctaaggttttatataagtgcgttgaaacatcttctttagaaaaattctttactaagtagtatggcaccgttacgacttcataacaaattggtgtcttatcagcgtagcgaatccgctccatccgcaaaacgttctcattatcttttagcgcaagacgctctttttcagataaagatggattgccaatctgataagaaattaacttacttgaaggaacttgaccattagccttagtaatctcagtaaaggacataattcctgacattttttcttgaaccttttgactagctacataggttccgctacccaagcgccgttctaaaattccttcatcttctaatgttttaatcgcttggcgtaaagtcattctcgaaacgccaaacttaactgccaattgacgttctgctggaatacgatcccctacttgataaacgtgattctcaatatcacgcttaatctgattgtgaatcttgatatacatcggttcttccatagtcgccacccccaaagtttagtactgctattattataatctaaattggtctagcttgcattaataacactgcttcaattttacagactattttttcttagcggtccacttcactccaagaatataaacatttggacgcttgttatattccacttcaacttgttcattatcattagcaactacactggcactaaattttgcttcatctttaacagctaagttagcctgattaggattcagcacaatattgtggcccttcatattagcttcaccgctcaaagctaaaaagtactcatagttcatatttccagtgaaggtaacacgtgtagcatcacatttcgcctgatcttgaaaatctgcatgagctaaaattacggcattgttcattgtaacttttgcttcatcaactactatcattcgattgatggttgaattttgaatgattgtccgtgtctttttatcaatataaaccccacccaaaaaagtagaattcataatattgctccagcagtcatcacttaaataaaagcaggaatcgctagcagacttaacttttgaattaagcatattcatccaagtttgcccatgcagtaatacataatctacttccgaattattaagatccaactccgcattcgttttggcaaaagtattaatactgccgtgaatctttgaattatttacaattgctgttccttcgccttcaattgccaaagcacaatatttgtccgagaaataatcaatttctgaatcattcatttccaaacggaaattggcatggtcatacatggaaactgaaccgttaacaattttggttgaataaagttccaacgtgatcttaccattaaccgcgatagctgctgtatcagttcccgtgcccttaataaagcaattacgcaaagttaaatagccatcaacgcctactggtacagataggctattatgttcggtagttgtatcaatgcataaattttctaaagttacataacgactatcttctgaaacactaatatagccataaatagtcgtgtcttctggcaaagagcctgttcccttaattgtgatatctgttagtgtgatgccctgcggcaaataataatatccggggcccagcatcaacacatcatcggcacgcaaatcctttaaaacctcgtgccaactgactgaactgctagatccccctactctaattatcctagccatccattatcctttcatctcgtaaaaaccgattactattgtactaattttctttaatttatgttgtatttttgctcatcaaaaaagctaggttcgattcctagcttcttatactatttcattttaacattccagtaataagccacattaccataaggagaaagttggaaacctttcactctcttattcaataagtatgacgtaccttgttggaatagtggtgccgcaaaggcatccttttgaattaattgtttttcagcgttaactaaggcattcaatctcttctgcggatcagtggcataagttgaacgagccaagtcaatttgcttccagaaattggcgttgtgataatctggcgctaaattaaacaaaccaccaactgtcaagaaatcaattggatcttcataacttggctaccaagttccgtaaacaaagtcgtaattgtgattagttgtgttagatagccgtgacttcaaaggaattgaccgtacccgtagagttagaccaggtaaatttttcatcaaattgctttgaataaattcacccacacgcttagcatcgtcaatatctgaagtaagcaattctaaggttagcttcttcttacccaattgcttcaaaccaagttgccattcctttttagcttccttggcattataggtaaccaagtcgccagcatccttgcggtaatcgttgccagttgcctgatcggtaataaagtttgcggcaacaattccatttgacaccttgccttgatgcaaaactgtcttgactaactgttgcttattaattgcccggctaatggcccgacgaatatgaacattgcctgtactcttacgcttcaagttgaaagaaagataaccattagttggcgtaactttggtatgatagctagaattattttgatactgcttaacaaaatcagaagtcaatgtcgtgtaatcaagttcaccacttctgaacaagttaaccccagttgaaggagtttgaaccacttgtacgttaactttattcaaatcaacaattttcttgttccagtaagttggatttttcttgtaagtccacttcaaatttgaacctgtccaaccagatacggtaaatggaccattgtaaactagattcttactgctagtcccatacttagagcctaactttttaaccaatttagaattctgaggatagaattgtgcaccctctaagatttgtggcaaatatggaattggattagctaatgtaacttgcaccttatacttgccgagtgctttgattcccaatgaatttaccggtgctttaccttgagaaattgcctcaccgtttttgataatggcataagaatcggcatctaaagatgaattttttgggtcaacggttctgcgccaagccgttacataatccagggcagtaactggatcaccgttagaccacttagcattattgcgtaaggtaaaagtatagaccttctggtctttagaacgttcaacttttgtcgcaccagctaattctggctgatttttcttattaaaacggtaaagaccttccatggaattctgcaaaacttctgaactagtcgtatctccatacttgctcgaatctaaagttgaaatttcatttgtgacagaggtattcattgtcttagtcggtgcagcattactgtcattgttagagcaagctgccagcaccaatgcggcagctgctgtcatcactcctgaaaaaatccattttttacgtctcaatcttctcaccctttacttactttttgtttaatacttacattttacaagtatatctaatacggaagaaatttcaaatactttttccgtataatagctataatcaatacgtatacaaaaatggcaaaaaaaaagaaacgtcacataggacgtttcttttttcgggttgggtgttcttttagaactattgggttagctggattcgaaccagcgcatgatggtaccaaaaaccattgccttaccacttggctataacccaataccagctgaactttttacttgtcgttcaacaatggaggagggtggattcgaaccgccgaactcagagagagcggttttacagaccgccgcgtttagccacttcgctactcctccgttagctgacttaattataataacgaaaatccaaatcaaatgcaagacttttttgaaacttttttcaaaaaaaagaagaagccatgacgacctcttctcaaaatttaaaaattgatttatatctaaacagttaattttaagcctaatgccttttgtgctacttgatttaccagactccattgcttgtcataagttggtgaaaagaagaaatctgcttctgctaaatcttccagtgtcaacttatttctaatagctaagctcaaaacattggcttggccactaatgtcatatgatgaaagtacgctaccgcctaagatttggtggctgtcttcattataaacaacagcaatatagcaagtaggattatctttttcaggaatatagtctggacgaagataactctttaagactgtttcttttgcattaattcctgctcgcttggcattcttttcactgagtcctgttgttactgcatgtaaatcaaaggcttcaagcaattgtgcaccaactaagcccttaaagacacgttctggcttgtcttcaaataagtgctcaacaacatattgagcctcatgccgtgcagcaatggcagatggcatcggtactcttctgttagctggaatgctaaatgggaagattgcatccccaattgcatagacatcctttacattggttctaaagtaattgtctaccttaatgtagccattgtcataaagatcgatcgtgtttttcaaccaatcagtatttggcttaataccaactgtaataatgacacaatcagcagtaatatcacccttatcagtctgaactgcattgacctttccattgccaacaaagccagtaactttagtgttcatagccaggttaacaccatgatcagtcaattctttttcaaataagctagtataagtatcattcaaataattttctagtggtttttgcccaccgtcaattaaagtaacattcttgcctgctttagcgaaaacctcggcagctgcaattccgttaccagcaccaataactgcaacatttttaatagcttcatcttgagcagctgcattgatctctgtagcgcaatcatagcctctcatcaacataatatttttcaggtctgctccaggaagaggcaaacttgcggggttaacacctgaagaaataattagcttatcataactaacttctttggttgtaccatcttttacgtttttgacagtaaccgtctttttagctggatcaagagctgttactgctgtgttattaacaactttaccaccccgttcaactagatcttcaggagtaaagtttctaacgttgtcttggcctgtagtttttccttcaaggaatagcttcattccgcaagacataaaggaaacgaagtcgcctgcttcataaatcgtaacgtctacatcatcataacgatctaaaatttcataagctgcctcttggccgccgtgggatgcacctacaataatgattttcttttttgacatagcctgacctcctaataatgcagcaataattgtcgtttttaagtaatagcagttattgtaactggttacattatttatcttttaataagatatttcaattaatttgcttttgattagtgcgaagcagcaatatattttttatataaaaaagagcactactgatagtagtactctagagggaaattttccaaaattatcttatttagctaattctgctgatagatttcgttcactaatttagtgatttcattacgattaagaacttcatcatacatatccattgtttcctggattgtattttctaaattagtaccatgatttttggcatagccaataaacttttttgcatctactattttagcttctttaatcgctttttctgcagctcttttagcaacttcattcatctcatattctggcttattcatgtcttcgacccattttccgctattcacgtagtagtcgatatccttctgcaggctgatatccctgcgtagtacatcatccgtttttctagatcatttttacgtgttgtttgcatctcaatatcatacactcgactttgatcatcttgtgcccagatatctaagcgaatgtttttggattctagtccaatgttgccgtcatactgggtaatgacattaacttttgtcaattttaattcaggaaacatccgacgtagcagttccagacaattctttttattgctcataacatgaccgaataccaagtcgttagtaattcgaggatatcgattaattcttctcctcatattttacctcttttctttttcttaagtaggaaaattaccctccactatttattactcaaaaaagtgcaaatttttcagaaatttaaaaatttagacacgaaaaaagccgatgcaaatgcatcgactctttcagttaaattattctactttttaatagaagtttacagccttgatgtaacgcttgttgttgtttctgcagccttcaattctgtagtacttcttaccgttcttaaatctcatttgaccaccgtaagtagttacagtttgacctctgtacatcttaccagtacctggagtacgacggtatgatgaccaataaatgtaggcattgtgcttaaaagtacgttggttaccagtaatgttggttacacgaacgtattcgtccttgttagccaccttgtagtaagtcttaccgttgatagttacaacagttggaacgatttcaatgtcgttgtaagcgtagtacatgtgacctaagtagttaccgttcttgtcataagctcttgaatcaaccattactggcaaagtcttggtgttagtgtcaccagctggcttaacaagtgatgaagtcttaacccaaatgttgcttgagttagcatctgacttagacttagttgaaacttgtgagtatgatacattgttaagggttctagtttgatcagcaacgtaaacagtgtcaccatctttgaaagtagttgaagctggtcttacattaatgccataaatgtggtaagttgcgattgagcttgcgccattagcatatagagcttgtttgtggcttgaagtaattaaaacagtgtatgttgcagtagtcttcttaccagttaaaccagtagcagttaaagttacattatagtaacgtcctgcttctgaagtattaacaggatttgaagttgcttctagtgaagcagctgtattattattgctgttttgtacagctgaaataataactggctcaccattactatttacaaaattagttggattaaattgtgaaccaacagctacttggaatatttgaccattaacactccccttgctttgaccattcaatgaccaattgatcactggattttgagtagtatctgtagttgaacttgaacctgaaactacaactgggatttgaacagtagctgtttgcgtagaagtagaacctgtaccagttaaagtaagattgaaatcactagttggtaccgcagtaatattcttgttatctttacacctgcattcttaagaatagcagcaacttcactatctttaaggttaactttttctccactggcattattcgtactaaagaaaactaatcctaaatcattaattgccttagtaacactagctacagtatctttagccttaatagaaatagtagttggtacaacattagctgttttatcggtagtacttgcagcatcaattacttgattgccatatgtaaagtatgatctatctgttggctttgctgttgttgctgtagtagtacttgtagtaccagtagtgttagttactgtacctaaactaatagcagcgttaactggaacagctgaagctgctacaggagcaactgccaacaaagcggcagcagccatacttacaattcttgtattctttctcataattatgtggcctttcctttctgaaacagaaattcatcctaagcagtaagttatatcttcttctgcttgtgaaataattatagcatgttacgaacccgattactaaaaacaggatcgactcgtgtgtgtgattttaagaatacctcctaaaatcaccagtaataccctaccctttatttgttaaactgtagttaccggacttttacaattaagattcaaaacattacatttttgtgaagttttaaacaagttattgatttatgacagaacttatgtgtgttaagaaaaggtaattttaacacttgttcgcttaaaaaaattaaagctcttagattttttgattagaaataattgcttcatgttctttaatatgctcaactcgccctgcatcccccgcaataagtaacaaatataatgcctcaatcattgtcatacttgccacgcgtgagaaataatactgcgattgcatcaccgtctgccgcactgctgtctttaaatgcacatcagctaatagcgcaatcggtgaatcatcgcgattggtgatcgcaatcaccggcatccctttttgtttggctaccttaatttgcttaatgattcccgctgcttcacctgaattcgaaatcaccaacaagcaatcctttttactcaggttcattgtctgcgcaattgccgtttcaatcgtgccacctgaatcaattgccaacaagccaatctgattaaacttatacactgcatcagcggccaccggataagtatcgccctccgcactaacctgcacaattctgctttcagtcaaaaaatgcagcacctgatctaatttggcttcagtcacattctccaaagtcgccttaatctcggcgactttatttttttcaatcaattccaaattagcactagcatcatcacgtgacatattttgaagtgacacactttcagttgcattctgagctagttgaatttttaaatcatgaaaacctgtcaaatctaaattatgacaaaaacgcgtcaccgaagcatcactcacctcagcttcagttgctaattttgaaattgtataatttaccacctgttcgggctgttttaagatcacttgagcaatcttctgatcactggctgacattgtcgctaatttactatagattgtatcgataattttagtcattattctcaccttttctgtgccaaaattatatcatcaatgtaattaattttcacaattttatttttaaagaaaataaatttatattttgattgacgaaaatcatttaccaaggtagtatgtatttgtaaataattttcacaggagaaaataaaatgaaaattaattcgataagtgacctcgctttaagtaaaatcaagccgaaaatgactatttctcttggcggcggaagcaatgtatttaagttatctcaagcgattgcacagcataacttagacatcacattatattctccatccgaacttactcgctttaggtgcaaagaactcggattagagcttcttccatctactgcagcgactaagatcgatattgcttttgatggttgtgacagcattgataagaattttaacgttctaaaaagtttgggtggaattcatctttttgaaaaacaggcagcacaaattgccaaacagtttatcctactcttacccagtcaaaggatacaaccgattctgaatcctaaaattccactttgtcttgaagtggcaccgccttgtgttaatcaagtacagaagtatttaagcagtttacatttaactagtaagattcgacaagatagttcagtagctgcatttgcccgtacgcctttgggcaactacttaatcgatgtttttaacgaagattggcacaatatcactgaacttaatcgtcaactttgtttacaaaatggcgtagttagttcttcactatttgaaaacttaactacttcattaattactgaaaaagacggagaaattattgaacttaagagaggtaataatcatgaaaacatttaattggggaattattggtactggctggattgcacatgatatggctgatgctttgaacaaagtcaacggcgaaatttatgttgccgcaaatccaaatgaagaagcactccgtgcctttgtccaagaaaaacatgtacagcatgctttcactaatcctgatgaaatgattaaggatcctagcattgatatcatctatattgctaccccacacactttccactacgactacatcaaaaaggccctcaatgctggcaagcacgtcttttgcgaaaaggcaattaccgtcaatgcacagcaatttgatgaagtggctcaattagctaaagagaaacacctaatcttaatggaaggttttactctttatcacatgccaatctaccaaaagatgcaagatatgattaagaccggaaaatttggcgaaattaaaatgatccaaattaattttggctcactcaaggactatgatccgcagaatcgcttctttaataaggagctcgctggtggtgcattgctggatatcggcggctacgcaactgcttttgccattagtttcatggatgaatatcctgaaagtatcaataccacggtaaaattctttgaaactggtgttgacgaagaaagcggcattattttaaaaaattcgaaaggccaaatggcagtgatgtcattatcgatgcgggccaagcagcctaagcgcggactggtttcgggcaccaaaggttatttcgaaatcaatcaatatcctcgcggcactgaagctgatattacttacacccagagtgctcatgaggaaagctatgataaggttactgccggggatgctgatcaggcgcttgaatatgaagtcactgattttcaaaagtatattgaacaaggccatgacgaaggcgaattggaaaaatcgcggatgatcgctcacattttaaccagcattagaactgcctggggcatgacttatccatttgataacgaggaataattagttggatttcaaaagggatcgatacataacatcggtcccttttatttgcacttattgcttattttctgcgacatatttttctagtcgtttcaagccttctttgatctgatccatcgacgttgcgtaagacaaacgaatatatcctgctccacctttagcaaaaaatgagcccgcaattacagcaacatgcctcttttcagccaaatcataaataaacttggtatcatcttgttccaagcctgctggaattttggcaaaaatgtagaaggcacctttaggcttaacgcattcaaagcctaacttggttaatccttcataaagcacatcacgccgcttttggaattctttcttcattggttccgcatcgttcattccattgcctagtgcttcttcagctgcatcctgcattggcgttggttccgtcgttgtgattgcttggtgaatcttagccagttgatccaaaatcggcttaggcgcagctaccacaccgattctatagccagtcattgcccaagcttttgacacgccattcattaaaacaacttgatcatgtaaagtcttttccatcgaagcatgtggctgatcataattgagctcactataaatttcatcacaaagaacaaaaaccggcttatctcgaacaacatctgctaaggcatcaagttcatcttgtgaatacatcacacctgttggattggtaggataattcatgacaagcgccttaacgcgatcaccatacttgtccaatgctgcttgcaatttatccggcgttaatttgaagtcatcgtcagaagtgtcgatttgttcaaccgttgcacccatggatagggcatccccaatataaagcggaaaaattggtgttggcaccaaaacaacgtcgcctggattaagcgccgcagtcaaaaagtcgtagatcgactccgttaccccattggtgatcaaaatttcgcttgggtcgtatttttgtccatatttttcagctaaaaaatcggctgccgccttgcgcaaacctggagtcccgttagatggcgcatagtgtgaatggttattagcaatgctggcttcagccgcttttttaatatgctctggcgtgttaaagtcaggctcaccaatcgtgaatttgacgatgtccgaaatcttgttggtgtaagctgcaaaggccaaaatctgccctggcttttgttcaaccaagccttttttcatatgttttgttaagtcgaccatagtttttcctccttatatcgaactaaatcaattcaaatataggagtctttttaatctttgtcaaaggaaatattaattttgatatctaaagtgcacattaaatccaataattaacaaagcataaatactataaatagccgtaacagtcggatacattgcctgatactttatcagcaaaagaataattaaaactatcgccaaaacaatcgttaatattctaaaacgttgaaaatatgacaaaatcggtaaagccactgtcaaaactatatcagttattaagatagtaaaatccaccggatatgatttgatataaaaaaactgaaatattggcaatgcttctaacagtaagaagatataactaataatcccacatattaaaagcaactgattaagtatctttttatagtctttcattaaatcaagaacttctcttttttcatgtaccagtgcttaaccagagtggtcaatgcaatgtacaaggtcaaaagtacaagaactacgagaacataatattctgggatcggaccgaatttcattaccttagccaagcttggaatgtaaggcattgcagtaccgatcaatcctgcaccgatcgtagcgagcattactacgcctgaagagtgctgttgtaagaagggaattgctggatcacgcaatgcttggataaccatttcctgtgtccagagtgattcgatgaaccagccactccagaagatggccataaagacagccttttgccctggagtagcagccacataacttgtgcccacagtacttggacaaatccagaagtaaagcaaggcaaacgtaatgatatcaaagattgaagatgtcggaccaaagaagaacatgaacttaggcaacttctttgtctcccacttacgtggtacttccaagtatttttcaccaactctatcaaatggaagtgacaaacaagatgtcccgtagatcaagtctagaatcaacaattgcattggcagcattggcaagaatggcaagaatgatgatgccactaagattgacaaaatattaccaaagttagatgacaaggtaatcttgatatatttcatcgtgtttgcaaagatctgacgcccaattcttacaccatgttccaaagtacgtaaactcttgtgcagcaagataatgtccgcactcttttttgcaatatcaacagccgtatcaactgagattgctacatcggccttcttcatggctggcgtatcgttgataccgtctcccatgtaagcaaccgtgtgaccattttccttcaaaatctgaataattctagcctttgactctggtgaaagctttacaaagaggctacattcttcaaccatctttttaacttcatcgtcgctcttaccagcaaaatctttttcactataaatgtacttggtgttcaagcctactcttgaagcaacactcttagttacagcagcgttatcaccagtcaaaatcttaacggtaatatcgtcttgctttaacttcttaagcacgtccttaacatcatccttaggtggatcaaggaaggccaagaagccagttaagatcaaatctttttcatcgctaacattgaattcaccggcttgagcaggattgttcttgtaagctaacaaaacaactctcaaaccatctttgttcaaatcttcaatgtgctttaaaactttttctttgtaatcatcagttaaatcgttgatgtgactgccaacttgcacacgattgcagcaagcaagcatttcttcggcagcacccttagttaccaggatacgaccatcgccgtggcgcttgaccacgacactcatgcgacggcgcttgaagtcgaatggaatttcatcaaccttagtgtagtcgtgtttaatttcattaacatctagctcatcgctagcggcatcgatgatggcttggtccatcaaatcgtgcatccccgtttggaagtacgagttcaagtaagccaagcgcaaaacctgtggattttccttcatatccaagttgtagtgccgttccaatacaaccttgttttgggtcaaagtaccggttttatcagtacaaagcacgtcggcggcaccgaagttttggatggagttcatctttttaacgatggtgccgtgcttcgacatttctagcgaacccttaaccaaattactagtaacaataactggcaacatttctggagttaaaccaacggcagtagcgatggcaaacaacaaggcgttgagccagttacctttagttaaaccgttgatgaccaaaactaaaggtgcaatgatcgcggtcattgttaacaataatttagaaatgttcttgataccaacatcgaaattagtttccttaacgtcgttgtttgaaatatccttagccaaacgaccaaagacagtttgttcaccggtggctaaaacaacgccaacacctgaacctgacacaatagttgttccttgatagattacatcaggatagtccaaatattgatccatgtctttttgatcgggcctcttagtcgcaatcttttccacaggcgttgattcaccgttcaaagaacttgatgaacagaacaagtctttagttttgagcaatctaatatctgctggcaccatgtccccagcgtggatattaataatatcgccgacaactacttgcttggtagaaatttcttcatccttttgattgcgacgaatattggtagttacagacaccatatttaagagggcttcaactgcgtcattagttttcacattctggataaaggatgttaatccagaaataatgatcatcgcaatcataatgatcacagtactcaggtccttttgatctgccggcacgaagacgtagtcggtaaacagcgacaccgtcgctagcagcaacaggaccattgtaaaaggagtgaagaatgattcaatgaagaaatgcaatttcgtgttgtgcttcttggtagcaacttcgttaagaccattcttctccaaacgctctttagcttccgccgaagacagaccgtctagcgaactatgtagcgtctttaacgcttcttcgggagtttgcctagcgatctgcttaacaaactctgtatcggctgtcttcttattaatcagcaacttgttttttgccatgttaatcacactttctgattaaacacgcaaacaaactaaaaaggagccaataccaattagtattaactccttatctaagcgatgtttcctcgtcgttcagttttgacactacgtgacgtaagcacaggctagctatctggatctcgccttatctcgacaagaactattttactcgttggcatctctggatgtttccgggcgatagcttgtgttcacgtaggagcctcacctaacagtttatttgctttttcaattttcatttttattatatgcatattatttgacaatgcaattatctttactaaatcgttagaaattgtaaaagaatttaagaatgataaaaaacacgtgtttgcaatgaacacgtgtttttttataatttaattttgatatactattctatagacatggatatgttgcaactatttgtgtttagtagttttagcataactaaccacccctcacacattttgaaattacggcggtgagagttatgcataaacggatagtttggaggtttagtgctccgtggtagcttgggctattgcaatcagcatcgttctaggtgctttaggcaatttagctatcaatttggctatagcctatgcgataacaaaaaaagctaatcgcaaggattagctaaaccaacagttatctgaaactacgatcgaagtcaacggattgcggccgtgggcttcttttcatatacagattataacatgaattatccgaaacgaataaaaaagatcaggctcactgcctgaccttgctattgggttagctggattcgaaccagcgcatgatggtaccaaaaaccattgccttaccacttggctataacccaatcttcaaaccttttacttgattggttctatttgaatgacctctcgatcacccaacagatattagtataggggaatgaagaaaaaatatcaaggaaaaattcaaaaaaattttgattttttcacatttgctcgaaggatactgaatctttcttttatgaattataaaattaatttgtttttttacgattataacttttgtgacttcttaaccttattcattaattcaaagtcgttggtaaaaattccagctacaccaagtttaaagtacctttttgctatgcttactttatctactgtccaaattctttgcgtaactttgctaggtaaataccaatgcggatggatcgctgcaaaatgattcttagccgcaaactgttcaggaaacggcaccggccatttgtttaaaaagcaatattgttggtggggatcaattcgctggcaattttttaaggtttgataattgaaggaagagaaaataatgggatgcacaaaatgatattcttgtgctaacgccaaaacgatggcttcaatcccctcatcatgaatcttgttagtcttaaattccaagttaacatacaaatcctgtccctgaagaatttcaaataattcacttaacatcggtaccggttcaccgttagctaaacgaaatcgcctgatttcacttaaggtatagtccttaatataacctgtcccattagtagttctatctaacgtttcatcatgcattactaccggcactttatctttagttaagtgcacatcaaattcgacaccttcagcgccatgcgttgctgcatatttaaatccttgcaaagaattttccgcaaatttgaccggtaagccccggtgagcaaaaataattgtctgagtcattttttcacctacaaaaaaatgccgctctcgcggcatctgctctattttaatctaagacgattgcaccttgagttgccaaagtatcacgaactagattcttaacatctcttctaactaccataccatcggtgttctcaacgtattcaagatattgagctgacttaatatgtgcatcataagccttgtcatcaaagtaaacttcgacaaaataccattcgttttcgttcttcttattgactccagacatcataatttccatgcctggttcagcagccatgctagtcgtcatttctttcttaacttcatgcgcaaacttttctgcatcttctggtttaacttcaactttaactaagcgcattacaaaatgatctgcgttatcattcaaagcatcatgagcctttgtggtaataacttcgggctttaattcgattacttctttgtctgtggaaatcttgtcgatggtttctgcaaaatcatcagcatgtgctgctgcaatgtgcaaatcttctgccaagctattccggaacaattcgatttcgtaattgtcttcaccatgagcatcgtcatgtgcgcttccaattaacaaagttccttcttcagctggaattgagttgtgcatgttattttcaacttcacggatatattcaccgcgatcgttttccttgatatttaatttagtaattctaaaaattggtgtttcatccatttttcttgcctcgtactataatctttccacacctatcattataaactaatgcagaaaaataaaagcccctattcaccagttatttgatcaattttaaccgctttagctggccattcagtccgtacatattccaatgtactgccttcattgctagttaactgcacaaaagaacaattgggcagacctaaaaattcacgatggttagttttttcattaatgtattgcgacaaactatcgccatgaccaacaactaaaatattatcgccatcttgtgcatcccgcatgatcaagttaatcccgcgctccattcgctcaactacctcatgattatcttccacgcgaaatttgcccaaacgatgcagcggccaaagtagcacattgcgtgcctcaaaagcgccatagcttttctcttttaattcctttaatcgaacatactccatctcaggcccagcaataatctctaaagtatcacttgccctttcttggggtgagcaatatgctctagcaaaattaattccctgatcttgaaaataatcccgcacggcttccgcctgcttaatgcctaatggtgttagcgctgaatcacagcttccctgcatgcggtgtcctttattaaaccaagtttgaccatgtctgactaaatataaattaattgccatttcgtcttactttaaaccctctgctggccacacgtatgaatcaaaatggatctttttaccatcaactgttagcttcacgattgaagcattgccaaaaccgccaaagttcttattctcggtagcatcgcgcacaaacttagctaaaatatcaccatgtcctacaactaaagcagtttgaccatcctctaagccgcttaaaatctcgactaccgcacggtgcattctagcaacaacgtcttcgtctttttccatagttgggtctacgttaggattattataattccaaggcaataagaactcatcacgaccttcaaaaatgccataacatttttctcgcaggtcttttaaacgcgtataaggcatttgatgatcagtaataatttccaaagtatcgcaagcacgctcttgggttgatgaaaaagctttgtcaaaatgaataccctgctttttaaaataatcacgggccatttcaacctggcggatgcctctttcattcaatggtgaatcacaacgtccctgaactttatggtaatagttaaaataagtttgtccatggcggactaaatataaagtttttgtcatattttcctcgctaaatcgttttttcctttatcttatcaaaaaagcacgcgtcgtgcgtgctttcatattttttcgttaaattttgaagttcttgttgtattcactcgaatttacaacaaaacttggcacactaatgaagtgcattgagtaaatattgccagtcttggaaatgctaaagccataataattgtagtccccatcatgacgtgagccctgtgtattaaataaatcaccggcatgttcccattcgcggtaaaggctcttatcattacgctgattttccccagctcctgcaaagccaaagatcatttgcttcaagccaaagtaaatatttcgcttcatttcagccatagacataatcttcttattagtagaaaaaccagccatatcttcgacataattatcgtttaattctaagccatgtttcttgcaagcccgtacaattccggcaacatagtgatcgccatctttgatactcttgccattttgctcgtattcttgcgcaattgaattagctaaggactctactccagaactataaacccacggcttcaaacctaattgactacgagcactattaattaggcacaaagagaattctgccagttctttttgctcactagcagaaagatcggcaagattgatcattttttgatcggctttgctttcacctgagctaacacgtgaaaagtcgttttgctccattcctttcatgcaagcctgaataaaactagcacttggcttccccttatatgcttgcaataaactagctttcgtatagccactcggcatcttcattgtagctgttacataattctgcgttgcagcagtctttttaacgagtttggcatttttagctaataaccattgagagttatttccaatcttataagccaaatattttttcttgcccagctttaaatactttttagcagaataagaatactctcttttagctacagcataatacttagacttcttgcccttatttgtataaagtctaactttcttagttcctttaacctgaacttttcccttaactgctgcttgaaccgtttgtggtgtcgtttcgtgtattacactagccgtccccatcaggcaaacactagtcaacaaagtcacaattaatttttgcttcatagctgttccactttctgtatgttttgattattaatatttgttatttaaattatatcgtatttatttaattaaaaaaatcaaaaagagacacactatcattttgacagcatgcctcctttaagttagtttgattttatttagttttgaaaagaggtttatttttagtaccagccgtttgcttgccagaatgccttagcagcagtccatgagccataacgacctttgacatagttatcagctactcgctcttggttagctgctgaatagtcaccattcaagtatgaagctgaaagttggtatttaccaacgtattgaccatttgaagcaccgtatgagccaccagattctctaccggcaatccattccttagcactagcttctgaaccacttacagttgaagtagtagtttgagtgttggtgttatttgctgcagtagtagttgctgcagaattagtattttcagtttgagtttggtgttgtactggagcttgggttacagcagcttgagtgtggtagccgcgagttacatacttagcacgaacccattggttcttgcctaagtcataccacttgtgacctttggcatcgtaagcagtcttaattactttccatgaggtgttgcttgccaaagtttggccagtagcctctggattcttgtagctgttgtaaacagtgattgcgttgtctgaaacgttcttaactgttacaacagctgtatcgttttctacaatagcagcttgagcagtattagtgttgttattagctgctactaaacctgtaactgataaagcagttactgcaattgacttaactaagatagatttaattttcaaaaaaattctctccttaaaattttaaaagtcataagtaacgaattttcaccttattcgtccgtcccattcaattgacacagcatatactaccttgcttaaattgcagaactataacaggaatatcacctgcagattaagaaactattgcaaagtatgtcaaaattgtaacaattgtaatatttatgtaaatttattcagatgatacaaaaccgcatcagatcgccatttaactcgatttttaatttttatttgctatgtgcaaaagcttgttcgcatttaatatattgaaacacttttgcaaaacgaaaaaagaaagagtttcctctttcttttttaattctcacaaattttttattaatttattccattattctgccttatcctcttctataagttgacgtttattaagtgccgcaataaatggcaggtaaatcaaaatgtctaagataatattgattacttgcaaaattgagcccgcaatactgcctgttgccaaaaaaactgaaataattggcggcattgtccaaggaattacagtcccattacataatagaactaagcctaggttcattgcacaataagtggtaatcgcatttaacattggcgcaatcataaatggaataattaacaacaagttcattacaactggcagaccaaacatagttggttcattaatattgaacaagccaggtacgatggtcagtggtgctaaaactttattttgtttacttgcgcgcttgcgccatactaaatatccaatgcaaagcactaacccaatagtggcacctccatcacccatgtaaacaaagttatcgataaatggttgcgtaacgatatgaccaccatgagctaaatctaagttacctgcttgattcaatacacggttagcatcggtttgcatcaaccagattggttgcatagcagtattaactacgttaccaacatgaataccaacgaactagaacaagctcaataaaataattgaaactaatgtaccaattaaggtatcgcctaatgcacctagtggcttagccaaaatattcatgattacatcgtgaatattgccccatccaatccaagcaaaaagccagtaaacacagccagcaatagcaattacagcggcacctggaattaaagctgaaaagctcttagctacagcaggtggcacagtagctggcattttaatttggatattatgattaataaaccattggaaaatccatgcacttaggagaccaaagataatagctacaaataatcctctactacctaagtaagtgtaagggaagccttcaactggaactttatctccactcataatacttggcgtcaaaatgaagaatacagctgcagaaacaattccggcagaaacaccatctgtcttatattgattagcataactccaagcaattccaaaagctgcaattaagaccatgatcccaaaggagccattagtaatcttggctaaaatctgtgccaggcttataccatgaacagcagtttttgatagccaatcagaccaaccggcaactggaaatgaattaatgatcctacaataattaacggtatagccatggcgataccgtcacgaacagcaattaaaggtttaaaactgcctattttagcggctacaggcataatgtgtttgttaacaaacgcattcaaacctccgctcgatttactattagccataataattccctcttcaatctaaaaatgatctcgtgtttctttggtatatacctttcgcaatataacaatatcctgaaagcgattttattaccactattttaaaagataattttttgcttatatttttaaccaaagtttgattaacaaaatattgcagttatggctgtaagtgctatagtttacatgtaatcataaaaaaagcgaggaaataaaattatggctaaatacgaagtaaagttaagcgaagaagatttacaaatgatcaaagattgtcattcaaagaacccttcaatcatgaaggctatgaacgaagccaagaaagtcgaagattaagcaaattttgatctctaaatcgaaaaaaggcgtccgcaagggatgccttttttattggttttcaaatcttgtaccgtggggatgcttccagttataaacacggactattttacccatgccatctagcactacaacatttccatcattatgtagataaatcaatggatcagaatgtgaaccaccgtcagtaaaaattcttgctggctcacctgggtattgcactgttctaactatacaatcatcaattgatagccgcctcatttgtcgaccatcatcatattttccttctaaagcagctgttggcgtatgaccagtcacaattgttttgcccgttttgttatgagccatcattttcaataaggaatcggaataccaatacttatctcgtgcccaaatacggtaaaaatcatagtcaaatttcaagccatactctatctcagagtaagtttccggatcattatactgttcatctggccgcacacccgcatgaacaaaaatcaagtgtggcgtttcatacataataggacagccttttagaaagcgataatactcactatcacgcaactcatcaggcaaaactgtactgccaaacagactaactaggctcttgccaccaccgttataaacccaaatgccatcttgatgttcctgcttctccgcaaaattgagtaacatttgctcatgattacccagtagtacgattgctccttcgcttttttgctcaattaaataatccaatacttccttcacatgctcgcggccatcaacatagtcaccgcccgcaactaattgtgcttctggaaaatctgctgttgcctgcttgattaagtctaaggtttctaagttgccatgaatatcagaaatgaagatatagttctccttcactcgatcatccaacagcgttcgattgataatttttttcatttcatactaccccatgtgctaaattaaactaacatttttttcttaattatagcagatgtacactggttctttttctatgcaatcctaaaattaacctccggcaaaaaaaaggctacaatagatatgaaaagaagtgattgcaatgtttaatgaagaaaatgcaattgatgccaaggacttacacgttgattctttcaaatatcaatcaactgaagacatgccatctgatgcttattctagctgggaagaaaaacacccaaacgccagggtattcaagcttgaatttcgcaacatcggcgaaagcaatgaatggcaggaaatgatcattatctacactgaataaataaaaagtggaagaactccaagcctagtgtgtttcttccacctttttacttattttgattttctttttccttcaatttgtgcagaatccgttcattttctttagtacgtttttcaactgctgcatcgatgatcgaatcaaaccaatgattatcagaatcatcgcttgtttgatccttcttttgaggaccttcattttttacacgtttgtcagtttcttcattaataatggaatccagccaatcaaaattatctggatcatggctcttatcagtcatttatttttcctccatttttgatttaaattaatttatttactattctttttgactataattgagttaacaagatgaaacaagaaagaagtgttcgaaatgaaaattacattcactgacaaggcgcttgactacttaaaaagacgcgaaatcttgaataaaattctaattttaatcgccgacgatggtggtggtaaatattctatcaaaggcggcggttgtgcaattggcagtcacttttccattatttatgtagacaaagttgatcctgattatccaatcaagcttgaaaacgaccaaggaatcaatatttacacttctaaatacgacaccacaatgatgggaccaaatttagtggttgactacgccaatgcatccctcaacttaaagagtgacgaaggattgcttgatggcggcgttgatatcggcaatggcgccgagttaattaaagctcaaaagaatgtaaaaatgaccggcgttgaatggcgttgctagattaagatgatcagaaaagacagtagtttgaaatcaactactgtcttttttctatagaaattgaccactattaggatcgaatccagtacgatctgccgcggtaatctttctaattaccttacatggattccccgctgcaattacattatctgggatgtcattcacaactacactgcctgcaccaataattgaattacgtccaataattgtatctggagttacgctaacccctgcacctagccagacattgtcaccaatgccgatcgaatgtgcaacacaaccaccggcttttcgctcggctggatcaaataaatggttgctggtatacaagccaaccttaggaccaaacaaaacattgtttccaatataaacaggcgcgccatctaaaatcgtgcaatcatagttggcataaaagttatccccaacatgaatattttgtccaaattcacaacgaaaattagggttcacgaagggatgctcacctgttgaaccaaagagttctttgattaatatttcttttttagcgtgatcattctcattattaatattattggtcttcaaggtagcaaggtctctcaaggtgccaaggcgaggatccgcatcattataaggacgaccagtagccatgtaattaaattttgttctaagcgacatgattctttcctttcattagttcttctatttttattatagaaaagaaaaagcgctttcgcatgtttgacgcataatatttagcacactagccctaatcttattgcttattctataatggtaaaaaagaaaggattaaagccatgaaaaacttcaacaaatttaccgctaaatttgctcgccttttacagaatctactagtagtcgcaattggtttactcgggattattctgatcatactcttattccgcgatctaattccactttgccaatcattattttcaactaagatcgaagaaagcaactccgagattatgtcagaaattatcgttttcttactcttctttgaatttactgcaatgattatttcagccttgcgtcatcacggtcacactagcatcaattttctattgggcttaggtgttactgcgctaattcgcagtctgattacttctcatagtaacatttggagtacgcttgccacttctgcttcaattttagtactagtaatcgcaatggttattttcaataaaaatctgcgtaatatgtaaaaaaactgtatcactctaggctaatgtcattggagtgatacagttttttgttttactaattaactttgcgccatgaactcattaagttgtttcttagaaaaaacattgccatatttgcatactacgtttcctttcattattgaacgtaattcacacaaccaaaaaagcatcatttattaacaatattgaaaataaataatgctttttagtaatactctgatgctgaatgccagagtcgaactggcgaccttctctttacgagggagatgctctaccaactgagctaattcagcaaactcacaacacatgaattataccaaatgtcgctaattggcgcaacgacctttttctaagctagcattcaaaaaagaacattatttccaatctaagcacaatccttgcttgtgcaattcttctggcaattgatcacgatcagtttcatgcagatcaagttttttacctgtaatctgcttagtgaatgaatcaatgcgacggttagaatcacgtaagtcataatatgtcgtaactatatcatcatagtctttaaggtctttcacatcaaagtctttcttataactaccttcaaaacaagtgaacttaagtggtaatcgtggttttaattgtggcttttgatctggcataccgacttgcatccccaacactggaaaagtcaactcaggcaaatcaagcgtcttaagcaaatccaacggatgatcgttaaccgtaccaagtggcacatagcctaagcccatactttctaccgcattagcgacattttgaaaagcaagcagcgtatcttctattgcttggaaaaagatatcagttgtgtgaacacggccgtcgtctttgtcaagttgctttctaatttgttggttacggtacaagtcaacgataaaaataaacaaatcgccttctgcaccaacatatttttggttacataacttttgaattttcttcttttcttcaggatcggtaacgtgcagtaagctagcattttgcataaacatgctggttggagtttgaccaaagacagaatacaaagtttccagttgttctttagtcaaagtttgatccttaaattttctaatagaacggtgatttaattgcgtgtcgattgtttcgttatgtatcattttcatccttcttactaataatcagtaagttcattataacaaataatatggctacttttcttcaaattcaattccgtaatctgcttgctctccgtgctcagctaaatcaagccccattaattcatcttcttttgatactctaattggaataatccttttaagtaataaaacgattatcgtcgtcatgatccctacaaatatgatagtaaataaagttcctaaaatctgagctgtaatcaaatgcaacccgccaccataaagcaagccattttcaatttgcgggttaacaatcttagtcgcaaataatcctgtcaaaatcgaacctacaattcctgaaacgccgtgacagccaaatacatcaagtggatcatctagcttcaattttggcttaatcacatgaatgaagccgtaactggctagtgtacaaataaaaccaatggcaaaggctcctgccacagtaacatagccagctgctggcgtaataccgactaatccacacaaggcacccgtacagaggccaatcatagtagtcttttctttaataaacatatccaaaaacatccaaaccacaaatgacgtaccagttgcaacagttgtagttaaaaacgcttgtgtagctacatcgcttacagttaaggcagaaccaacgttgaagccataccaaccgatccataatatactggttcccattaaaacccatggtaagttataatgcttaacctcaccatttggatcaaaatcaattcttggaccaacaaaaattgataaaaacaaggcggtaataccggcggtaatatgaactacagtcccacctgcaaaatcaagcatccccgttttggctagaattccatctggtgtccaaaccatatgaaccattgggtaataaatcaagatcgaccaaattgcgacaaatgcaagtaaaaatttaaatttcattcttccgaccaccgcaccaacaaacaacgccggcgtaataatcgagaacatcatctgaaacattaaataggtcaaaattgtgatgcctgaatccttggaataaagcgtctttaaatcaaagccgtttaaaaagacacttttactcaaaccaaatattccaccaacatccttacccaaagccaagttataaccaaaagcaataaacaaaacgattgcgacacctgtaatcatgaatactgaaatcatcgtattcacagcattcttctttgaaaccatgccaccatagaaaaaagcaagtccaggtgtcataaagaaaactaaaacactagcgacaaaaacaaatagagtgttcgtttgattaatcatctttttttctcctcaaagtaaaatagttagtcctaatattttaaattggtatatacactatttcattgatgttgcagcatatatgcttaattaaaaaatattggtttgataaaatttaattctcattatacactcatttttcttcttgtcattaattttctataaaaaataaaggtgcatagacgtatggcttctatgcacctttgcatatatttgcttttaattatttgttttcgttttcaagattgttgattgcagtttcaaccaatgcatatgcttgttgagcttggttcttagcttgaacatattcgttcaagttgtcatcaccattagtaagcacacgtgcaaatgaaatttgttcagccatcaagaagttgaacaatgaatcccacttcttgtcttcaaacttgatttccttagcagaaattctaggcatcatttcacgtgtggtattaaatgccttttccaaaatttgttcatctgcatcggttaattcacgcacattgtatgcttggtggatttggtgaacctttaaaagttcttttaataaagttcttgcttgtgcatcttttgaaactgattggttaatttttaaagccatttttacctactcttttcttttttattaacaattataccaaattgtcttcgaccatttgcttaacgcagcgtttcatttctttaatatcaagaatactgtaggcaaattcttttctaagtagttcctttggcaaatattgatcgtacttgtcgattcctggcacttcgtttggataaaccagatcaagcggatcaaagtctttatcagcttcttcgcctaaaatgcgccagaagtcatgctcatcagcatccatggcaaaatacatgaagtatggtctagatgaattaaagccacggatatttaactttttaccgcacttaattcgaattaatcgctctagtgccaaaaatgcataagtcccagtccatggaaaaagacaccacatattaccgcccagcttgatcaaattattctttggcagaccagctaaagcggcggtgtctctagcttgcgtcaagcgagctttaccattttgcatcaaatatggatacatcatcttttctgcaagtacctttttcattctctgtaaaattttaggttgaatatctccaggtacatctccaaagtaggcaggaattctaccctttacttcatggcaatatacttgatgacgcttgatatccacgtcttcgacaacccatacacgtccagcaatcgcaatcttgtctcctacaggaggtggcttaacgatcgtacctaattcttcgctgccagcgtgaacactgaattcctcgttttcttggaaaactgcgtaaaatttaaagttattcacaactcgttcaccagcaagaccaacgatcagaccaccatcttcagtccactcaatgtgacctgttttaagcaagtgtttgagcaaaacgcgataatcgtcttggctcacgttgtggaaatatgacaaagttaacacccgtgaagcaagttcagctggcgtcatttcaccgcttgaagccagcgtactcatcgtctgatgatagagcaaactatatggcaaacggttaggttcaggtggctccacccatttttcttccgcatacagttgtaccaaggcaatcccttgaagtagcggccacggaatcagttctggcaacatcgctcttgattcagggtgttcttcgcgcatgacaaagtgcatctctgatggattaccgcggcgccctgtccggcccattctttgtaaaaagccagacacagtaaatggcgcgtcaatctgaaaagcagattctagtttgccaatatcaattccaagttccagcgtagctgttgcacaagtcgtcatgtagacatcgtcatctttcattgcggcttctgcagtttcacgcaaggcttgagacaaattaccatggtgaataatgaagcggtctggctcatgattataggcacaatatgctctgagctcctgacaaacagcttcacattcttcacgactattggtaaaaacaagacactttttaccacgagtatgctcaaaaatatagccaattcctgggtcagctaattctggtgccttatcagttttcggttcgatttggctcggatcaaagtccctggaacttgcttgtggatttgttttataaaaatgttccatagataaatgccaaatctgtggttcattttgtacccttggtgtaacagtttttctgtttgaaccagcacccaaaaacttgctggcatcttctaaattaccaatagtagccgaaaggcctattctccgtggatttacattagctagttttgataaacgctcaattaaacaaaatgtttgtccaccacgatcacttctaagaaatgaatgaagttcatcaaccacaatatattttagaccaccaaaaagatgcggaatatccatgtgcttattgatcataaagctttcaagcgattccggcgtaatctgcaaaatacctgaaggatgcttgagtaacttgcgcttttgtgtttgagctacatccccatgccagcgccaaactggaatatccacatctgtgcataagtctatcagacgatcgtattggtcgttgatcaaagccttaagtggcgcaatatacagaacttttactgaatcttctggctcattataaatttccgacaagatcgggaaaaaggctgcttcagttttgcctgacgcagtcgaagccgacaatagcacattatgatcggtgttaaaaatttcttcggccgccgcaacctgaattggtcttaaacttttccagccatgttcatagatataatcttgaataaatggcgcataatgtgaaaaaacgtccatagtccatttccttaaatcttaaattcggtataatccttttccgcattatccgaaacagcctctgacttggtatagctgaattgatccgagttaagcagatcagtgatctttctatcaggattctgccaaacaatgtcgagcagctcaataaagtcacgaataatttcacgtggcgtgatattggtatccgctccaacacgggcatattcaatcttaataaattgagccaaatcatcatcagtaatcgtgcgctcataaccgtacaaattggcatgcatgtcagctagtttttcagtcaaaaccaacatttcttcagcggttaatggttcaagcttaattactggcgcatacatatcacgtgctccttcttgagcgaatttgcctgaagcaagtcggctgcgtaaagcttcgtatgaataaactccgcgacgacggtctttaactgcttgtggcgtaccacacataataatgcctaagtaccttgctttgccctgcaaggtatcgttgtacatggtcaaaatcttttcatagttgtactggcggctaattgcattcggaattttatagatattaaccaattcatcaatcataatcattaaaccagcatagcccgcttgtctaaagaaagtcgcaaataactttaaatattcataccaatcactatcactaataatgatatcaacgcctaattcctttttagcctcagtcttatggctatattctcctctgaaccacttgactactttagccttagtctcatcatcaccactcatataagcgtgatagtacatgttcagcaatttagcaaaatcaaatccatgaactaattcgtttaatgaagaaatgacgccatagattttctggtcaactgcttgctcaaatttaggatcatcattatttaagcctgtttcttgcgaaacttgcatctgcactgaattaatccagcgatctagaatcaaagtcaaggcaccgccttcaggcctagtcttagttgataagttctgaattaattcacggtatgttgctaaaccctgtccttttgatccttgcagccgacgttcaggtgataaatcaccatctacaacaacaaaatttttatccatcacatagttacggatcgtttgaagtaaaaagctttttcctgagccataacgacccacgataaaacgaaagcttgctccgccttcttgaataacatccacatcgtgtaatagggcctcaatctcggcctttctccccacggtaatataaggtaaccctattcttggcactaccccaccctttaatgaattaaggacagtttgcgcaattctttttggtactcttcttttttgtggcatgatttcatcccttcaaaaacatatcttttaagtcatctacataatcggtaattacttgtggttggtcctgttcgttattttctaaaaccacatcaccgaattcatcaaataatttttcattaatattatccatcaaaattgatgccattaaatggtgctgcttcaaataggtctgccaaggctgctgcatcagcaatgcagttaagaaaaacatttcattttcatctaagccatattcattatcaactttgacagtttcatctgcttgtttttctacttcttcttgcgcttctgcctgctctagctgcttttcctcatccgttaacaaactatcacgcgtcttcgaagcattggcccgaatttgatccaaatcggagaaatcaatcttaatctgatcaatctgcgcctttttttcttgaatgtgatattcagcaatccccgcgtcaattgccttaagtacagcttgatcaataaatcgcggcttaatcgaccgacctagtttaaattctgttcgcgccactctatctaattcatggagaaaattatttaaattaacccgctgacggctgatttgttgatcacaatgaatttgccattttccttggtaaaaatgatactttcttactgcatcaatctgatggtcagctacttgttgttgtcgcagataaaaaacactgcctacaaagattggcttttcaattatatcaggcttgcccacaaacgcactgtaatacgcaatgccgtattttttagcatccagcagctccagccacacgtaacgcaacagttgaacaaataacttttcattcttatacgcgtggtgctagttaaatcgttttagttaataaaaaagtccaatcttgttagactcgacttgtaaatagtaataatagaaaagagtctgatctgattgaactgccttaagcttaagcgttttagccaccatttacaagttagttttaaagatttagtgataatttgtcggcactggtatcgtttgtatgcaccggctgagtttactcatcggcgaaatattgatcaaattaaaactacggacagtctgattttggctttacttatctggcaagctaagacaggaattgaatcacaaagaagattctgtgaatgtttcaattgtttatcacactcacgttttaatcggcgttcacgtcagctattgcaattgatttatcagatacggcaagaaatgaataaaaaggttgacctgaatggacagttcttgatcattgacagctttccggtacctgtttgccaaccaattcgaaactatcgtgctaaaatttttcgcggttatgccaacattggttataaggccaccaagaaaatttacttctatggtttcaaagttcatgccattgttagcgatgacggttacattcttgattatgtcgtaacaaaggcatcagttcatgatgccagggagacagttgaactgatagaaaatacccatccatctaattactatcttcttggcgacgaaggctatttaggcaaagaactgcatcaacagctaaaacaaatgggttacgaactttggacaccatatcgtaaaaatatgacaggagctaaaaagcacaatgatcatcaattgatggctattcgcagaacaattgaaagcgacttttcgcttctgacctattacaatgccgagaacaatcgagcacgtagtctgataggctttcaaagccggttggaaattgcaattttagcttataatttggcttattgtctagaacgatttaactagcaccacgcgtattcttattaataactttagatgaattccaataagtcgttttctttgcaaagactgctgctaactcttgcgcagtaaatttttctggatggtgtaaaacctcataatcatgatcacgcttaatctcagatgcaaagcgctgcttaataatcttttcgtctaaatcataataaagaacataatctttgagccagtcttgtaaatatacatcaatactaatgtcaaattgtcgcacatatttttcttcaaattctaacagcttttcatatccatcttgtgcgtcatcaacaccaatattgttcagtaattcataaatataaacaaaggcataggatgtactcgttttttcaaaaacatgctggcgaatcttgctgcgccaagtaaagtaacttctaagctgcccagtattcatatcatgataagttggataaaaacgcttaaaggcaaaaaattcaggataatcatcatcatagtcggccatcatcctagcctgttgataaaaattcttagctcggccacgactgggcaaaatactgtagtcataaacttctagcatctttctaattctatctggaaccagactattgttatgcttcttgcgaagattttcacttggtttaattgcttgggcttgatagcggtcatctactttatctggtgcaatataaaaatattgattctgggcgatatttacttcatcaccattcatcgccagtttaaaagcaaaatcaagtgcttttttgagtgaatcttcactaactttttctaatattgccccaacccaatctgccgccttgatcttcattggatcagtgaagccaggcaaatctcttattagtgcagccattgcaccacatttcaggtccaatatactctgaccttgcccacgtgataatatcgcaaaataaccactatcaactggtgacattaaaacgtaaacgctagtggaacctggtacagcaggcttaaatttcaaaccatatttggcatagacatatttgaagagttgatttgaatccattttgtctcctttttttcgcacgtacgttcattatatcatcgatttattttttaccaaagtcacgcatgtcagctcctcatgtacatttttaagtttcataaattttatatttttatatttgtgtggttattaacaaacaattatgttactatagtttatgtaagttattgaaagcgtttttataaaagcttcctagagaggacaaaaacttaatatgagtacaaaagaacgttattctcaagatgaattaagaaaagataatccaatgtttagccgcactcgtgccactattgaaagtgcattttacggcaacaatgtccacgaagtaaccagtgttgcagaagcttataacttagctaagaagcaatcaggcgttattgttactgacttgccaatcttacacactaaggaattaggtttgccacatggcgcaacccaattggtttacaaccacggcaagattttaggtagaactgctagcgcccgtcactttgttgacaatcctaatgaagatgctgaagcattggacggcaacctacgtgaagatatttacaaggggcatgaacaaaagtacttaaaggctactgttttagtaggtcttgacccatcattcactgttaaggctcacattatgatgccagaagatcaagccttcaaccttctttcatacatcctcaacttccacttcttcgacgatgaagctgaaaaattatacgaaaagtcaaagttctacgatgaaccagacatttacttctacttcgatccaaatgttcaagacgaagattaccctaagggcttaggcgtgtttgacgctccacataactgtgccgctgtatttaaccttcgctacttcggtgaattgaagaagggtaccttaaccttagcttgggctatcgctcaccgtcacggctacactgcttgtcacggtggtgaaaagtcattccactttgacgataaagacgacaagacctttgcattctacggcttatcaggttcaggtaagtcaactttgactcacgaaatgtacgatggtaaatatgacatcactgttttacacgatgatgccttcattatttcacgtgaagacggttcttcagtagccttagagccttcatactttgacaagactcacgactacccagctggccaccacgagactaaatactacaccactattatgaactgtgatgtaactttagacaaagacggcaagaaagtcatcgtaactgaagacttacgtaacaacaacggtcgtgttatcaagacccgctacactagtcctcaccgtgtagactttgaaaagtcaccaattactgcattgttctggattatgaaggacggttcattacctccaatcatcaagatcgatgacccagtattggcaactactatgggttgtactttagcaaccaagcgtacttcagctgaaaacttacctaagggctttgacatgaatactttggttattgaaccattcgcagacccattcagagcttacccagtttcaggtgactacagagacttcaaggaattgttcactaagcgtggtgctagttgctacagcttgaacaccgacgcatttatgggtaaagacattcctaaggaagttactaagaagttaattgaagacttagctaacggcaatatcaaagacagtgacttcaagccatttggtaacttcaagggtgtatcatacttacctattgaaggctacgaagttcaccttgaagacccagaataccaaaagaccttgaaggatagaatgcaagatcgtttgaactggctcaacaagtacgatgaagaacacccagaaactccaattcaagatgaagctaagaagaccttggaagctatcatcaaggaattgagctaatattaaggaaatgaattagtgtctcattcaattaaaatttaatttcttaatgacgaaaagacgagagttgaaattcagctcccgtcttttttattgctcaatgtaattttgcttctgtagtttggcatctatcagtttataaacttgcactttattctcttgtgcaagttgtggattatagttatgtgctatttcaatgacaatagccggcaattggtagattatcttatgaatggcatcactatttttagggtctaaacttgaacaaatctcatcaagcaaatatatcttcttagaacgaattagacctctaactaaagcaagtcgttgtgcctgaccacctgataaattgttcgcgtcatctgaaattaatttatctaaaaaatcattgccaaactcatgaatcagtcccatcttttttgcttcatgaagcattagatcatcaggtatgttttgcagaagtgatagattctccctcactgtaccttggaataaccagattctttgcgagatcttgatgaaatcggcaggattaatttgatgaccagcaaaggtgatttcaccgttatacttcagattattagcaatacaattaattaatgtacttttcccaatgcctgaagccccagtaacaatgatcttgtcatgatcacgcaaagttaaatttataccatctaaaattttcttatcaccatatgaaaaagacaaatcttttattttcaaaatagcttgagagtcatgattatcttgtttaacactttcactttcttcaaaattatagctttttatttttctaattgcatcggtgctatgaatttgagtctgatacaaagcaattgttcttagatatcccacaaccctatcagctgacaaacttaaagttataatggccgctaccgttacgttaaaccagcctctctgcataaaaagcaagccaataaaaattggtagcaatagtgtaactaaagagattaaccatgcaatgaattgtacctggaattgacaattattcatcttacgatatttgtcttcctcattaaccaagattcgatcaaatcgtttaaagaaaagatgtctgacaccaaaattcagtatttctaagcgtccttcaaatatatccttcattgcctgaatcaactgtgagttagatttattccatttttcggttttctcattcatcctcttcttgccaatatagcttggaatcagggttagcgctgaaagaagcaaataaataattcccaaaatcagattagtttctacaacaactattgccgatgcaaccacattaaatacaaactgaactatgtcagttatcccaaagaaatatttttgttcaatttctttagcagtaccactaatcgaattgattacatctgctcctcttgcttgcttcatgtctgaattagcaaatttagaataaaaatattcttgctttaaagcaatatttaatagcatcacaattctattttgaaccaaataaaacaagagcatggctatgtagactatcagatatgcgccaaaggctaagccaataaatttataaacgtggtcaatgttactaaaattgatattagttaattgtccaaacagtacagcatttaataccccttcaaatgctgaaatggccgataaaaccagaaaaactatttgtaaatatattggaacatgttttactacccatttaaaatttatttgttgtgtgttcattgtttaatacccacatatttctcataatcaacaagccaatcttcatcatttttataagaatgattcatacactttttaaacccaattgctttaaatcatcttcatctttagtttctaacaattgtcgctcttctagagacaagtgatacttattcactaaggcatcaatattctccaaagaaatatttttaccatcagaaagatcctttcttcataccttcagacattactatacctcctattttctctcgttaagtaatgcataattttcaacttgcaatttactgtgtatgggattgatatcaatgcttcccataattccccaaatgcttataataataacagtaagtattctcttattttttaatttcaaagccaggaattcattatgtacggtcaaaaatttaaagcacttcgtcttcaacaacatatttcactagagcaagctgctaacagagttatctctccatcgactttatccagatgggagaataataagattgatattcgcttcaatttagttattaagcttttagacaatattcatataaacctaaaagagtttactaattactgcaaaattaatcatagtaatccatttgttgcgaaagtggctatgtactatgaagccaacgatgatcgtcatattttgcaattaatacaaagcaagaaaaaagaataccaaaattcacataatcaatttgatttacttctactagctatcgcatgtaattgttattacgatctaactgataacaatgttttcccagtgagctatcaaaagaaattattctacattttatctaacattgaatattggacagagatgtacatcaatgtttttggtaacactgtttttctctatgacagcaaggaactatatagtatttcaatcagaattcttaaaaatttaaattctaatacatttaatgattttcaagaatattattatgctttatcctctgtcatcaacgccctaaccgctctaattatcaaaaatcccaaattagcatcacagcttttaactaaaatagagaaagtttcaattcctaaaccaatctcttacttaaaaattagaactaatgtcctcaagtatcttttagattaccgtttaggcaaaacagatgaaaagcttatctcaattaagctagaaaatttaaagtggttaggattaacagatattgcaaaagacttaactttcttctttaaccgtataaaaaatgatcgttcacctctttcctaattcatttgcctattatattaccctcatttttatctaattgatttttctttgcaaatatgcaaaattatttttagcaagaataaaaaagcctattaaatctaggtgtttacaaaccctgatttaataggtcttttatgcgtcttttttattgctcaatgtaattttgcgccttagttaaaatatccatcttctcatgttcagttaaatacttttgtgcttctgccaaattgacccatttactagctaaaatttcttctttttgaatgttaacctcttgtcctgcaacatagctagcaacaaaataaactactgtcttagctttatcaacagtcaactgatattctgttttttctctaaaagtaaagtcaaaattcggctttaaaccaacttcttcaaaaacttctcttctagcagcttcctcagctgtctcattattttctaaatggccttttggaaagccccaattatgatttacgacgctctgcacgatcaaatatttcagctcgccgcttctacgttctctgtaaataactgcacctgcagaatgttccatcttcatttttgtcacccaacctttatattgcataattattaaatatttattaacgtatgtcaagcaattgtaatcaaaaaaatgaccagatctttgacgatctagtcactttattcgcagacgaaattattaagttctattggtagaatattttaagttacttcttcaagttcttttcgcagtattccttgaccttgtcatcatcggccttaagaatccattcaactgcagcctcagtcttcatggtgtctcgaccatttacttccatttcgtggtcccaaatagcgtcacgaataggcatttcattacccttagcccagtcaaaaacttgatccatatttctatcaattaatgcagtttcttcaatttcttttgcatctgccataattaaaagcttcctttctgataacgactttattgtagttctattagctacaactgttaacaaaaagggacttttttatttaaattctaatttttgccattaactgcttcatcagccttattcactacactaaccgcattaagtgaacgaggataaccaatgaatggtacgttttgttcaatgaccttcatcaagaattccttgtcattgcctaatttgatatttgcttgagcatgggccatcaattgaggttcacagccaccttgagctgcaatataacagaaggtaatcatttcacagtcattgtcatccaagccttttctagtgtagtaatcgccaaagcaattatcaactaaccacttattgattgttcccttcttggcaaaacccttcatttgtggaccaaacaagcgcatttgagtttcctcacccttttcaaggcgattgtctagtgtagtagttgcttgacccgcaagaggtaattcaacgccgcgcttagttaaaacatcattagtaatcttgaaaaatggggaaactctacccaaacctaaataatcaaccgcttgatataaacttccttagcttcaactgggttaacaccattgtctagtacgactggaagcattatttcatattcttccttgccttgcatccccaacaaataagctaaagttgacaacatcttagtccggtcgggcaaatcaacgtctttttgcacttcgtcaaaagcaaaatgattaattctttccaaagcttctggatcagtagccttcaataagttggcatgtactctttatgcatcttctttaattgacataataaattcctttctaaacgcttatctctactatttatttaagtacgattgagtctaaaagaaaaatatctattttttattctgcaatataacttattcttatcaaaaaaatatcctaaaggctttttgccttcaggatatttctattaggttatttaattagtttttcttgtctgcttcagcatcatggtatgacttaacgatttcatcaactaattctggatcatctttcaaatcagtagtttctacaatgacatccttcaagtcttcatctttaagcatttgcatcaacttaacgctttccttgtcgttaggttcatcaaagtgataaattctaccaacagtttccatcaatgcactgtagtccaaacctctgtccttcaattcacggattggacggataaatctttcattgtagcctaacttacggattggagttctaccaacacgagcaatatcatctgaaatatatgggttttggaatctgctcaaaatcttgttgtggtattcttccaaactttcttcggtgaattccttgttccacttgtggtaaagaagtgaacgggtttcactcaagacacgcttaacttgctttaaaacaaatggatccttaatagcatccccaatagtgtcatagccaaggctcttgccagtataagcaacagttgcgtgtcccgtgttaactgagaataactttctttcgatgtaaggttcaaggtctggtgcatagtcaacgccctttaacttgatatccttgttcttcatttggctttcgtcaataacccattccttgaagtcctcaactgagacaaacaatggatcgtcattatgttggataggaacaattctgtctacagctgcgttagggaagccaatgtacttgtctagttcaggcttaacgtcatcgtccaagtgcttataaacttcttcttttaagtgttctgaaccgccaatcatgttttcacaagcaatcacatcaagtggagtagtgttgcctgattgaattctagcagttaatcctttggcaattaatggagcaatgattgccaaaatctttggaccaatggcggtagttatcatatcggttgatttaattgcttcaactaccttgtctggatccttagcattgttaattccatcaacatttgaaacatgaattctcttcttaccaggtgcggctaattcaatgtcatattcaccacgcttgtttaattcatcaataatagtttcattaacatcaacgaagtcaatgccaaaaccattatctgctaaagtttcaccaataaatccacgaccaatattacctgcgccaaaatgtactgctctcatgtttaatctcctacgttctttaataaatcaataatttcttctggtgtttgtgcgtctgcaagctttgcaacgttggaaacatcactacagaaaatagcaatctgtgacaaaatatttaagtgttcattgttcaaaccagcaatcccaaagacaacggttaccaattgctcggtatcatccttagggtcactaaaatcaacgcccattggaatttggactaccgaaattccagtttttttaatgtgcttcttaccttcgtcagttccgtgagggatggcgatgaaattacccatataagtcgacacatcttcattacgggcaagcattgaatcaatatactctggttcgacacagccgccatcaactaataattgaccggccattctaattgcttgatcccgcgttggtacgtcttgattaagtttgatcatttttggatctaattgtaatgccatttagctcatccctttctaattcaacttttgaatagcttcgccaagctttttatctttaagtaaatcatcaacaactagggtttgaatatcactgtatctgacagccaagttcttattagcagctggagtaacaattactaagtgacttggatcatcagtcaattcgttgattcttactgccttaacaggagtagtcttaccagccttcttaattgcgtcattgaataaactagttgccatagtagcggtacctaagtgttgatcgtgacggatgaagtccacttctttaactttactgaagtcgattccttcaagtgaaccaaccttcttaactggtttttcagcctttggcttatcttctacttgagttaaagctttgaagctagctacgattgtgtcatatttcggactactcaagaagttgccaaccgccacgtgcattgcatgtggagtcttttgtaaagcgcggtcagctaattcttcttgcgtgatgatcaacaaaccatcttcatctttcaagtttctaacagcggtattggttactgaaaccttaatgccagccttcttgaatttatcacgcaaaagtgaagcacccatagcagatgaacccatacctgcgtcacaagcaaagataattttcttaacattggcatatgacttaactgattcatgtgcatcttcagcttccggcattgattgacctttagattgggccttcatggcttgcatttgggcttgttttgcttctaactcatcaccagtactcttgtcgtttttaagaataattgcggcaataatgaatgaaacaactgcggcgccaagaacaccaacaatattaccgaaataagcatcctttgcggaaacaagcaagatagctaaaattgaaccaggtgaagcagctgcttttaatccaccaccaagagtagtgaataagaaagtaccagtaacaccaccaccaatagcggctaaaatcaatgatggtttcattaatacatatgggaagtaaatttcatgaaccccaccaaagaattcaatgatggcagcaccaggagctgagctctttgacttacccttgccaaataaagtaaaggcaagcaagattccaagtcctggacctgggtttgattccattaagaacaaaactgacttaccaacttgtgcagcttgttggatacctaatggaactaagatcccgttaccaatagcgttgttcaagaacaaaactttggcaggttcaataatgatgttggctaatggtagtaagtgaactctaataattgcatttactcctgcactagcccattgactgccaacttccataatcggtccaatgataaagaaggcgaaaatcgcagcgatcatgcctagaataccaagtgaaaagttattgtagatcatttcaaaaccagatttaatcttgtcctggaatacttgatctagtttcttcaataaccatgcactaagcggacccataatcatggcacctaagaacattggttgatcagtaccaacaattacacctaatgtaccgattgcaccagcaatggcaccacgttcttcataaaccatgcgaccacctgtataaccaattaacagtggcaacaggtaatgaagcattggttgaactaagttattaatttctttgttagggaaccaaccgtgtggatacataaagaatgcagcggtaagtccccaagcgataatggcaccgatattcggcatgatcataccggataaagctgtaccaaatttttgaaccttcactttaacagaagatttactttttgcttgagccattttcttcttcctctctcatcaacttacatttttattctaagtcaatcagtaagcgcttacaatgaaatgaaaatagaactctggcacacttttgtgccagagtctgagtttacctattctattaagcttttgaactattggttacctagtaaccgatctttgaggtcttgtaaaaaaagtgccgcaattgcttctttaatttctttttgactgccatttgtaaataaatctaagttttgactagacatgataatcatgctggaaatagtactcattacccgctgttcgggtgcagtaagattgtctggtgccagcatcaaaagaactcttttgacttgaatggtatcatgatccattgattggagcgagatttcattatctaagtcaaacatggtaaatgaacagcgtgtaatttctggactacgtgtgtgtagcaatgcgatatggctgttagggatgccaactggtgccattcgtacacgtttgagaagatttttggcaacgggcatttgcttacgaattagtgttgaatccgaatgggctaaacattcctgaattactgcaattaagtcttgcgaattgtattccagttgttgaatcttgattccgttgactagctccgagcaaaataatgtactaatcgatagcttagcaagttgttcgactgaatggggatgtttttcttcaactacctgtttagctggaactggttgaggatatttttgttcataatcttttaagtaagcgcggatttttattaattcatcatcaagcagtaatggactaacaagtaaataatctcttgagaagcccttcaatctcaaggttgaaaaaataagattgtaatttgacaagtctatttgatttaaggcagaaacacggctggttttgacttctttgatttcagaaaattctctttttagtttggcacctaagattgccgacgttccaatgccattttcacaaattactagggccgataaattacgctgctgattgcgactcgtgtattcattggcaaaataaagcaagatcaactgcaactctgacgctgtcaaataattttctggaaacgctaaatgccaatatttttgaatagctagatataaatcaggaaacttttgactaaggcctgccagaatttcaataggtgtatctggtaaaagagctactttatgttgtactaaaccaataacgtgtttcgtcactttagtcataaaactatgatctttttgaaaatcccaatgcatttcttcagaaacgtgttgaacgaattcttttactttgactgagattgctaattcgcgctcattataagtcaagtaagtgttgtgataatcacatgataataacttattagctaagtatgagacatcattttggtcaacctcaacttgccgcttttgcgcaaacaaggccataaaacggtaaacataaccctgatatttaagtgaatcagcactggggtggataaaatctagcttgcatcccgccagagttctttttatcgttaccgcaaaagttaaaattaactcaatcagcttttggtcactgtctagcttaattttaccaaacacgctttttttaagacaatcagcaacctctactagcaaagccttatcaatcattgtcaaaaacatgtctttgcttgtcgtttcattatgcagatacttaaaaaagttatattcattgatctgattgagcataatatcaactaaaacctgacgccgtattttttcaggcgcctgaattaacagtcccacaccctttttgcggatcaagtcaatatgatatcgttttagcgacctttcaaccgtattcaaatcactttgaatcgttgcttcactgacattcaggtcaagcgcaaattgaataattttacatggctccgtacttaaaagcaacttagctgcaattatcttctctcttttagctaccgaaattacattttgactgtgagattgttgcacagattgcttaatttcttgtaattgctttgaatcgccagataaaaaatattttcctttttgattttcaattttaaagtcgttcttctttaaatcgccaaattcgcgataaaccgtccggcggctgatctttagactctcttcaatttgtttgatacttaccccactcggatttcccaacaaaatttgaagaatgtgcttttgccgttgtgttaaaaacatcccatcatcctcgcttacgtttaagtttattatacttgaacgcaaaaaaagaagacagatctcaaatctgccttcttgaggatatttatttacatattaattattcaacagtaacactcttagcaaggttacgtggcttgtcaacatccaaacccttatcctttgaagcgtagtaggcaagaagttgagttggaactactgtcaaaagtgctgacatgtagtaattaatttctggcaacacgatcgtgtcatcactatttgcgaattccttgcctacaatagtaattactgaagcaccacgtgaagcaacttcttgaatattaccacgagtaagatctgcagtaactggatcgttaatcaaggcaataactggagtgccatcttcgatcaaggaaatggtaccgtgcttaagttcagctgcagcaaagccttcagtttgaatgtatgaaacttccttcaacttcaaagcaccttcaagtgcaacagcgtgatcaataccacgaccaatgtagaatgcgtttcttgattttacaatatattgatcagctaattccttaagcttttctttaccgtcaacaatttgttggataccttcagcagcgatggctaaatcatgttgtaagtcccaatccttagcatcttgattaccaagtttttcaccaagtgccttagctaaaatagcttgtaaggcaacttgtgcagtgtaagccttagttgaagcaacggcaatttcaggacctgcacctaaaagcattgtgtagttagcttcacgtgataaagttgagccttcaacgttagtcatagtcaaacttggaataccacgcttgttagcttccttcaataccacgcgtgagtcagcagtttcacctgattgagtcaagaaaataaagaatgggtgcttgctcatcattgggaagtggtaaccagcttctgaagcgtaaccaacttcggtaggaataccagtgtagtgttcaaaaatagttttaccaactaaacctgcatgataactagtacctgcagcaaagatataaaggcgatcagccttagaaatagcatcaataatatcttgatctacctttggttcaccattttcgtcaaggtagttttgtgacatgtgacgcattacgcctggttgttcatcgatttcttttaacatgtagaattcgtaagtaccctttgaagctgcgttagggtcgatgttcaaaacgtgaggttcacggtctacctttttgccatcaacagtttcaatagtgtaagaatccttggtaatgtcaccaacatcaccatcttgcaagtcaacaaaagtcttagtttggtcaagaacagaaatagcatctgaagcaatgatgttaaagccatcaccgattcccagcatcattggtgacttgttcttagcaataaatacgtggtctggttctgtgttgtcaacaagcaagaaagcatatgaacccttaaccaacttcaaagcttccttaaatgctgaaaaagcgtctaagttcttatcacgtgcaattttaccgatcaattgaacaactacttcagtatcagtatctgagtggaacttaaccccttgcaagtacttttcctttaattctgtgtagttttcaatcacaccattgtgaactagatagaaacgcttggtttcatcaaaatgagggtgagcgttatctacagttggcttaccgtgggttgcccaacgagtatgaccaataccaactaaaccttgttcatctggagtcaacttttccttcaagttagaaatacgaccaacagccttagttaagtattcgttaccatttaaatcatttaagtaaatgccagctgaatcgtaaccacgatattccaagttggttaatccatttaaaataatatctcttgcaggcttacctacaactccgacaattccacacataattttctcctttggtctagtttgctttgaagtaatggactagcttatttttattgttacagtaggtataatagtctttttgcaaaaatcggtcaagtacaaatattcaaaattggtattataattttaagcataaaaaatggctaccagaatttggaaactgtcaaatcttttgtgtaaatagatctttctcgtaaattgattttttaattatttatttaatcaaagtaggattctaaggtgtcctgaacctgaccaaagcctttatgaattcgattgaaataacggtcattgtagctcattgcctgaatgccaataaaagcatcaagcgactgttcagttggaaactctgccttaggcttagctttgcgcttgatcacattgttaaatgattcaatcatgttagtcgaataaattgaagctctgatctgcttgggatagttataaaagaccagcagatctggttctatgtctttcaagcttctgataacatggctgtaaaccttgccccatttggtatagaagtcatgcaggacagctgtggcttcttctttgtttgtctgttgatgcacctgtttgaattcgttcatgatcttttcacgatcgtcgacgcgtactttagcgcagatattgcgcatgacatgaaccaaacagcgttgaaaatgagctttaggataagtcctggccaaggctgttttcatgccaacaacaccatcagaaagaaaaagctcaacttgctttaagcctcgggatttcatgttttgaagcatctctgtccagacttcaatgttctcgctaggcgcaatgcagtagtcaatgacctccttgtgcccattaggcttgatgccaatggcaatatagactgcttcacgctcaaatgtttctcggcgcaaaggaaggtatgtcgcatccaaatagacgcagaaaaacttgtcgcttagcttgcgtttgtggtaagcctcaacctttggaatcatctgcttggaaatatttgatacctgagctggactgtaatggctgccatacatcttttcaattagatcggctatttccctggtggtcacgcccttggagtaaagcttgataatcatgctttccaagatatccgagtgctgcttgtagccaggcagcgtgtgctgatgaaattgaccgttgcgatcccgaggcacttgcacttcaattgggccaaattgcgtatcaactttgcggaaataagcaccatttctagagttgccagtattccagccatttctggcatagggatcatagcccagaaaggcagtcaattcagcttctaacaagttattaacagcctgttgtagctctttgcgcaataaatcatttattttgtctggattgaatagagcttgagcaaaatctttggtaaaatcattcatgaaggagttcttctttctgtatgtgtttttttgttcaaaccaatcatacgagaaaggaactcctttttctaatgtttaaagaaataaatttaaggaatcattcatccttacacaaactattttacagtctcagaatttgctccgatagccatttttacttaagtcaattttaacttttattacttgtttttgatacccttaccttcatagcagtctctcatcaattgagaaatttgactaattaatggagctgatgggttagtaacagtgttttggtcgccataagcttcaacagctaattggtccaccttcttgtcaaactcagccttatcaacgccataatccttgaaggccatcttaataccaactgattcagccaaatcaataattttctgaactaatttttcaattaattcagcatcacttgaaccagttaagccgattgctctagcaatttcagcatagtcgctttcagcacggtaaactgagtaatgtggccacatagcaagtttttctggacgcttagcattaaagcgaatgacttgtggcaaagcaattgcgtcactgacgccacttggaatatcaaaagttgaacctacggtatgagcaattgagtgttccaagccaaggaaggcatttgaataagccattccagcaatcgtagctgcatcatgcattctctttctagcatcaagatcgccatcgtaagacttcttcaagttagcgaaaattgctttaatagcttcaagtgaccaaccacgagtgaagtcagttgccatggttgaaacataactttcaattgcgtgacctaatgcttcaaaacctgaccaagcaattaaacgtttgggcagcgtttgcacaaattgatcatcaacaattgaaacatcaggtgttaaagcatagtcacataaggtatgtttaattccagttttggcatcggaaataatagcaattggggaaacttctgaaccggtacctgaagtagttggaatacatacaagttggacaccattaatctttgggaaacggactactctttttctaatgtctaagaattttgggtaagcctcttcaaaactcatttctgggttttcgtagaataagcgcattgctttagcagcgtccattactgaaccaccaccgatagcaattacaacgtctggcttgaagatgttcattctgtgaacaccatccttgatcacatcagtattaggatcaagagttacagccttaaagacttcatattctttttgacctaaacgcttagaaatgatatcagtaacttcatcagcaaagccttggtcagctacaccttcatcagttacgatgaagaaacggttaacgtttggcatgtgacgaaggtagttagcagcgttatgttcgaagtaagtctttgatggtacctttacccattgcatgttatcacggcgtctagccactgttttgatgtttaacaagtccttagcaccaatgttgtgtgagaaggtattggcaccatatgaaccagtacccaaggtaagtgatggcaacatattgttgtaaaggtcaccgataccaccgagtgcagctggtgagttgactaagatacggcaagcatccatcttcatggcaaattcatcaataatcttcttgtcatttgagtgaagaccagcggtgtgacctcgaccaccatagttcaataaatcggtacaaatcttaaatgcatcgtcatggttcttagcacggtacaaagtgaagactggtgaaagcttttcagctgatagtgggaagtttctacctacgcctttatattcagcgataattactttagttgtctttggcacatccacaccacaaagcttggcaatttcataagctgacttaccagctactggaccagcaaccgtaccacgacgaggatcaataaagtgttcctcaaacttcttaatttctcctttgtttaagaagtagcagttccacttcttaaattcttctttaactttgtcataaatttcagtatcaacgacaactgaattttcagaagcacaaaccataccgttatcaaagttctttgataaaacaatgtcataaactgcacggtcaatattagcagtcttttcaatgtaagaaggaccattaccaggaccaacaccaatagctggcttgcctgatgaataagcagctttaaccatacctggaccaccagttgccaaaatagtttgaacacctgggttagtcatcaaatcggtcgttgcatcaaggcttggttcttcaatccattgaacggcatccgcaggagcacctgcagcaacagcagccgcacgaatgattttaccagtttctacacaacatttttgagcctgtgggtggaaaccaaagataatggtatttctcgtcttcaaagcaagcattgccttgaaaataacagttgaagttgggttagttactggagtaacacctgcaataacacctttaggttcagcaatcttagtcaaacctaattccttgtcttcttcaatatacgccgacggtcttttcgtgacgcaaactgttccagatattttctgaagcatacatattcttggtagttttatcttcaactacaccacgtttagtttcttcaacagccattttagctagtgggtaagcattttgttcacctgcagtagcaactgcttcacagatcttatcaacttgttcttgtgtgaagttagccatttgatctaaagcgacatgtgatttctttactaagttatcgaccatgtcgtagatttgctttttcttttcgtcctctgtaagagtctctttttgttgtgtcttagccattgtattattacctctaagatctactaattcttgtgaactaatttacaatgtcaactatagcacaataactttatttgtaaatgcatgaatttatgaaaatagtgaattaacaaagattcacatttcctcataatttcgctctaatgcaaatgaaagctattccttaattatttgtttgtgaattaacaaacttatttttaaaaaacagatttttgatatttttttaaatctaactatagagtctggtcatactaattgataatgataaaatattaagtatatgtgaaaagattgagaacattgggggggcttatatgagtgagaaaaaaacacagaccgcttctggttataaacgaaccctaagcaatgcacacattcagttaattgctttaggtggaacaattgggaccggcctttttctgggggttggagacagtattcaccgcgccggtcctagcgttatcctgatatatattattttcggtatcttcctcttcctgctaatgcgggcactgggagaactaattatgtccgacttgaacaagcacacatatattgattttattgaacaatatttgggtaaaaatattggctttatcacaggctatttgtattggttaagttggattaccttgggtatggccgaaaccacggccctaggaatttacttcaagtattggtttccaacactgaaaccttggattccaggaattattaccattgtgatcttgctgttaatcaatttaatttcagctcgtgtctttggcaacttggaattcagttttgccattatcaaaattgtcacgattattgccttcgtcatcttgatcctttacttactagtaactggtggcaaaaccagctttggtcctgttagctttgctaaccttgacgatcatggcggcttcttcgcccgtggcagtaaaggattcttacaaggatttcaaatggtaatcttcagctttattggagttgaattaattggtttaaccgcggctgaagcacaaaagccagagacaacgttgaagcgagcaatcaatcaattaccaattcgaattattttgttctatgtcatggctattttaggaattttgttagtaattccatggtccaaagttgctactaacgctagtccatttgttgaggccttaggtgctactggtattaaaaatgctagttctattattaattttgtagttatttcagccgccgtctcatcaactaacagttttttgtatagtgctggtcgattacttttctctgttacttttgacggtaaaggaaaatggaataaaacttttggacatttatcaagaaggcagcttccacaaaatgcattgactttatccgcattattgatgggatgtgcaccactaatcaccttggttattggcgatcaggcctttaattttatctcatcaacttcaactagtatgtttttaatcatctggagtttgatgattttaactcacatggcttacaggagaaaaacagcagctaatcagctaaacgattttcaaatgccaggttacccttatatcgattatgtaatcttgtcattcttcgttttaatgattatcctgctattgattttaccaagctaccgagtaccaatggtcgctgcaattgcaatctttattgttttatacatcatttccaaaatttggagtaatgaaaaagctgtttaaagcaaaaagtcgagttttttagctcgaccttttattttgcaatttttttaattattttagcaggatttccggcaactaccgtattagctggcacatctttggttacaacggcattagccgctacaacggcgtttttacctaccgtaacgccaggcaatatcgttgctttagcgccaatccaggcgttttgtttgataacaactggctttaattccagttcttttctatgctgtggatccagcttgtgattaactgaaatcaggtaggctccaggcccaatcaacacatcgttctcaattgtaatcccgcctaagtcgaccatcatcacattggcattaataaacacgcgctcgcctaatttgatgttgtgcccataatcagaataaaatggtaaccgaatctctatactagcagctattttttgaccaattatttcactaatcaattgtctaacttcacagctacaatgccgttgtgtatttaaattctgcaataatcgctgattctgttgggctagttttcgacgtaaatcgtgatcttctgtttccattattaccactcctttttcttgctctacttcagtttaaagggtaagcttatcaatgtgcaaagcttataaggtatgaagtataataacaattgtttataggtgatttaaatggaattacgtgttttaaattattttgtcgctacagcgcaagaattaaatatgacgcgagctgcacaaaaactattagtctcacaacctgctttatcgcgtcagatagcagatttagaggatgaattaggcgttaagttattcaaccgccagccgcggcacttaaccttaactcctgcaggacagtatttatatgaacaagcaaaagaaattcttactttagcttccaaaaccaagagtaacctacaatctagtgctgtcatcagtggtgacctaactattgctgccggcgaaagttttgccatgcaacgtctaatgaatatcgtcagcaacattattcgggattatcctacagttaaaattcatattctaagtggcgattatgaatttgcagaaaggcgtttagatacaggtgcagttgattttgccgtaatcattggtaatctacctttagataattatgcttctctgcagctccctgagaaggatacatggggcgttttaatgactaaggatgatcctctagcaaaaaagagtgctattacagctgaagatttagttggacgaaacgtcttaaattcacaacaagccgaaaatcgaaagtactttgattcatggttcggtaattataaagagcaaattaatatcatcggtactgttaacttgaatttcaacggtacacttttagttaaaaataaagcagctattatgctcacactcgataagctagccaatatatcagatgaatccaatctaacttttagaccaattactccaatgttaaaacagccggtaacagtaatttggaagcgagaaaccaataaatcacctgtagctgatttattcctaaatcgtttacgagcatcaattgatgacgattaacaaaaataacctagatcgaattgatctaggttattttttactttatttctttttacgactaaaacgttgcttcaatcgttgccataagcttaatgccctgcgcatatgatcagctggtacatattttcttattgctcgcaatacctttttggaatcacgtgccgcaaaaacaaatttaccatttgacttagttctgatttcaaaacgcggaatataacgtccaccaaagcggacatctgcaaccacataagttacttcattccaaggaatctgaacataatcttcaacgtttcgttcgttataaaattcaaaagctctatcgccgatcatgattttgccgtatgatgcaattcctctaaaccaggttgcatcaacagtgagatcgacttttgtattaattgacttagccatttattaaagaatgccccatacgtggaagagaacaccgacaacgaagataccgatgataatccagattggtgaaactttcttcttcaataaccacatacagaagaaagttaagagcaaaccagctaaaccaggaattaattggttcaagttgtcttgtaaagtagtaactttagtactgcttaaagctttaccgttacccatatcccattgttgaagagcggattggatacctttagcacctgatggaagcttgtcccattcgatgtaaccacccttttgaataggagtttgagaaacaattggagtgaacttgatgtttacccaacgttcaattaaggcacccaagacgaacatacccatcattgaagcaccacgggtaaccttttgaagcataccacctgacatatcactggtgatagctgaaccagccttgtaaccaaattcttgtgtgtaccataagaatgcgattctgataatattccagataacgaagaacaagataggacccattacgttacctgcaatggccattgatgcacctaatgcaccaacaattggacgaacagtgtaccagaatacagggtcaccaacaccggccaaaggtcccatcataccaaccttaacaccttggatagcgtcatcagtaacttctgcaccgttagccttatcttcttccaaagccaaggtaacaccaagaacaggtgatgctaagtatgggtgagtgttaaaaaatactaagtgtctttgtaaggcagcagataaatctttcttgtttgggtataactttctcaatgctggaatcattgaataagcgtaaccaccgttttgcattctttcatagttccatgaaccctgaaggaattgtgagtgccacataacgttaaaacggtcgcgcttggttaatttagttttcttatcagccattatataaatcctcctctatgcgttcattttaatagtcatcaatgatatcgccgagtggatcgccagtgccggcatcgccagaattattgtttccaccgttgccacccttagcttcaagagctaagtacatcaaagccattgaaaggccaatagcaccaagggcgatcaaagttaagtctttgatagcagcaagggcaaaaccaattgcgaagaatggccatacttccttacttgccatcatgttaataaccatagcgtaacctacggctacaaccatcgcaccaccgatagtcataccttcgtttaaccattgtggcatcattgcaagccaacttctaacagtacctgaagggattgctaaaagaagtgcagctgggatagcaattctcaaaccttgtaaacatacggcaatccattgccataagttgatcatacgccagttacccttcttagcttctgcgtccatgatgtgaacgatagcagttgaaatagtacgtacgatcatagttaagaacaaaccagcaacagctaatgggatagcgataccagtagcagtaccaatacccttaataccttgaccaccttcgatcaagataatagctgaagctactgatgctaaggcagcatctggtgcaacagcggcaccaatgttagcccaacctaaagcgatcatttgtaatgaaccacctaaggcaacacctaaatccaagtgaccggttactaaaccgatcaaagtacaagcaactaatggttggtggaattgccattcatccaagataccttccataccggcaagaaaggcaacaaacacaaccaaaatcatttgaatagcgttcatttatttactcctaattatttattactttttttcgtcaagtaaagtttgagccttcttcaagatagcatccatattacctggagcatctgaaggaacttttcttacatcaaacttaacgcccatcttttcaagttcacggaatgtatcaacgtctttttgattcattgataatacgttgttggcgttaacatcgccttccttatatgacattgaaccaacgttgatattcttaagatcaataccgcctttgatagccctcaatacatcttctggattttcaaacaaaagaagtgcatgagtgtttccaaatcttggatctttagcaatttcttgcatcttcttgagtggaacagtatgagccttaacacctgctggtgcagcttcacgaatcatactcttacgtaaatcatccttagctacactatctgaaacaacaattactctatcaggcttcatagctggaatccaaccagttgccacttgaccgtgaagcaaacgtgaatcaattcttgccaaaacgtacttgatatgaccatcaccaataacagtaccttctggaatgctcttcttactgcccttagcagcagctttgtcagctactggagctgcagcagccgtcttaggcattaagtcagctggcttagtcttaattccatctctaccaggttgaacaactgcagtggcgatgtgctttgcagttgcattagcatccatcattctctcagtcaatgcttgtacaaccattggtaaattcataccagcaacaattgcccatttatcatgcttttcagcaagtccatttgcttggttaaatggagtaccaccccataagtcaaccaagaacaaaacttcatcttggttatcaaatgaagcaattgctttttccattttgccacgaatgtcatctggaccttcatcaggctttaagataacatgtgcaaaattatcttgttcaccgaaaagcatttgtgcagattgtgcaataccatcggcaaagccaccatggctggctaaaacaattcctaccatgtaatttcctcctctagatcaaaaaatgaatccgcttttattatacgataaatatagactttaaaaaagtgttttttgaaaataatttcataaagtgccaatttgtttcaagcagtccaaatgccttgtctcccaagcaaagacagaaattagtctaataaaaaaagaaagcctgttttcatgattttgaactgagacctaaaagttagacacttttaggtctttttctacgtaaagtcaagcataataagaagtttggcttcattttttgtttaaatttcaacttaaacatcttttagtgtcgatttatttttttagttagacacgacaaataagcccagatccatatctgatttttgggcttagcgttataatgtacttgatcaattaattacgactaaagtctttttgattatgtgtggctacgttgtaatcatatggttgatcattgataatcagggcataaatggttctgattagtttatgaattgaagcaatagctatctttttgaaccctttggtttgagaggatagctttttgctttcataataatctgctatatgacacggatttgtcttagctgcattatcaatttgtccaatagctcgataaagcaacttacgtgcgactgcattgccatgtttagtaatacttaaattagagtccatttctcctgactgatatctgcctggatcaattccgataaaagcattgattttattaggattactaaatctgcgtaaatctcctaactctgctaaaactctgacagcagtggtctgtgcaaagcctggaatgctttctaggttttctaaatcatgattaggcaaagacttcgctaacttaaccattcttgcgattaaattttctctttgatcacttaaattaagcaatctgtgtgcataatactgcacttgctcgacttctatgctagagcaagatacaactggataagcttgataagctaattcaattaatttatctgcagtccttagagcgtgtttaaaagcaatcccctttaagctcattaaccagttaataagctgttttttatcttctcttcttactaagtcacaatgaggatatcgcacaactatttgccagtaatttttacctttagcagaagaaaataaattttcaatttcaggaaaagtcgattgtagagcttggtgaagtcgatttttagctattaccaagtcacttgtcagctggtcatagaagcggctcaaagcattaagctgcttataagtttgggattcgctttgattaaccggatggcgataaagtctttgaattaaagctaaatgataagcatcagttttatcggtcttgttgtagcgtagccccatattcatctcttttttggctttaagcggattaataacaacatattcatagccgtagtcttcaagaaaagcctgcagtctgcgtgaataaacaccggtagcttcaaaaataatttgcggatgtttagaaaaagcggttaattcatgaagcaattgaataaaaccaggacgattattagtaatggttagttcatttttgctttcaccaattagttcacaaacagtagaagtagacttgcttacatcaattccaaaagtaacttgcataataaaaacctccaaaacttagtagtaaaacgtatttacttaagaaatcagatctaattttctaaactcgacatctagtgtccacattcttcgaagagactattgaaaacttaagtaaaactgccagtttattatgcgacatcaagtgtctaaagacctcagggcatatcgttttaccactactttaattctacaaaagaataaaaatagtgaatcaattatcccgtcggataactaattcactatttagcttagaatgtttactatgtctaaatttaataaagaacaaaaaatagaaatttatcataaatggaaagatgaaaatatctcaatcagtcaattggctaaagcgtacagaatgaatctagctaatttagactatatgcttagattaattgatatgcatggaatagaaattttaactactaaaaaccaaagctattccaaagagtttaagcagcgaactattgaacaagcaatctttggcaataaaccatacttacagctgtctttggaactggggtttaaaagtattggcatgcttaacaattggattagagaatataagaaaaacgggtataatgtcattatcaaacagaaaggacgccctgcccgtgaccaaagaaaagcagaaatctcgcaaggaactggagaaagagatccagcagctgaaagaagaaaacttgcgattgcgtattgtgaacgaatacgtaaaaaaactaagtgccttggaccaagaagatcagaagaaatagctagggtgattacggatctaaggcaagaattcaaagttagtttaaattatgtattagctgcgattgcagagcaccctgagctacctataattgccagaagctcatactacaagattatcaaacgacagcccgccaagcctaaacggtcaaagcttattgctagaatccatgagatttttaatcatcatcaaggccgctatggatatcgcagagtagctttgcagttaatcagagagggctggaaagttacggagaaaaccgttcgctattggatgcataaattaggtcttaaaggcatcaggcgcaataagcgcaaatattcaagctataaaggtactattggcaaaatagctccaaatttaattcatcgtgatttcttcgcagccctgcctaacacaaaatggtatactgatatcactgaatttcatcttaataatgaaaagctttacttatcgcctattctagacggctgcggtggcgatatagtttcttatactatctccaaacatccagatatggatttagtaatgacaatgcttgacaaggcttttgccaaagaaacagctcttaataactgcatttttcatactgatcagggctgtcagtatcaaagccctcgttatcagcgagctttaaaactccatggtattactcaaagcatgtccagaaagggcaactccatggatgatgggctaatggagaacttctttggcctgctcaaaactgaaatgttctatgatcaagaatacaagtatcataatcttcaagaattaactcaagcaatcgaggaatatatcgaatactataacaacgaaaggataaagagcagattaaaaggcttaaccccgaaagagtatcgaagtcaagcctctattaatccaatattttaattgtctactttttacgtctcagtacatttgagtcgtttttcacaaatttggcttcctattaaaatatatgctggttggataatttcattttcataaaataacaaaaaagaagtcttccgcttccttctcccctttactccggctgtcagactcgaactgacgacatcttgattaacagtcaagcgctctaccaactgagctaagccggaatattaaaaaagagcacggcagcttcctttcctcgcaggcagttgcccaccaactactttcggcgttaagaagcttaacttctgtgttcggcatgggaacaggtgtatccttcttgctttcgccaccgtactcttttgagcttttacactcaaaactaaacataatccttctcgcaaaaaaccttccagtttgcttcgctttggtcaagtcctcgactgattagtactggtccgctccatccttcacaggacttccactcccagcctatctacctcatcgtctctgaggtgtcttactgcttacgcaaaggaaatctcatcttgaggggggcttcgcacttagatgctttcagcgcttatcccttccgcacatagctacccagcgatgctcctggcggaacaactggtacaccagcggtgcgtccatcccggtcctctcgtactaaggacagctcctctcaaatttcctacgcccacgacggatagggaccgaactgtctcacgacgttctgaacccagctcgcgtgccgctttaatgggcgaacagcccaacccttgggaccgacttcagccccaggatgcgacgagccgacatcgaggtgccaaacctccccgtcgatgtgaactcttgggggagataagcctgttatccccagggtagcttttatccgttgagtgatggcccttccatacggtaccaccagatcactaagtcctagtttcctacctgctcgagttgtctctctcgcagtcaagctcccttatacctttacactctgcgaatgatttccaaccattctgagggaacctttgagcgcctccgttacactttaggaggcgaccgccccagtcaaactgcccacctgacactgtccctggcctggcttacaggtcgaggttagagcatccttcaaacaagggtagtatcccaacattgcctccaataagactagcgtcctatcttctctggctcctacctatcctgtacatgtttaaaagatactcaatatcaagctacagtgaagctccatggggtctttccgtcctgtcgcgggtaacccgcatcttcacgggtattataatttcaccgagtctctcgttgagacagtgcccaaatcattacacctttcgtgcaggtcggaacttacccgacaaggaatttcgctaccttaggaccgttatagttacggccgccgtttactggggcttcaattcaaaccttcgcttacgctaagctctcctcttaaccttccagcaccgggcaggtgtcagcctctatacgtcatcttacgattttgcagagacctgtgtttttgataaacagttgtttgggcctattcactgcggctaaccaatctcttggctagcaccccttcttccgaagttacggggtcattttgccgagttccttaacgagagttctctcgctcaccttagtgttctccactcgactacctgtgtcggtttgcggtacgggtatgtcatctctggctagaagcttttcttggcagtgtgattaccacaccttcgctacttttaattcactcctcttcacaactcgtgttgctggttagaagcatttgactcttaaccgcacttgttgcttgaacatcgttccatcgcgatgcgtgcttcacctcctgcgtccctcccttcgctcttaacgatttgacacagtacaggaatctctacctgttatccatcgactacgcctctcggccttgccttaggtcccgacttaccctgggcggacgagcctgccccaggaaaccttagtctttcggcggataggattctcacctatctttcgctactcataccggcattctcacttctaagcgctccattgatcctctcgattcaacttctccgctcttagaacgctctcctaccacgtgctctttaaaacacatccacagtttcggtactatgcttagccccggtaaattttcggcgcagcgccactcgactagtgagctattacgcactctttgaatgatggctgcttctgagccaacgtcctagttgtctacgcaactccacatccttttccacttagcatagatttggggaccttaactggtgatctgggctgtttccctttcgactacggatcttatcactcgcagtctgactcccgtgtatggatatctggaattcgtagtttatctggattcagtaacccctgacgggcccctagtccaaacagagctctacctccattatcctctccacgaggctagccctaaagctatttcggagagaaccagctatctccaagttcgtttggaatttcaccgctacccacaactcatccccgcaatttttaacttacgtgggttcggccctccagtgcgttttaccacaccttcagcctggtcatgggtaggtcacttggtttcgggtctacgtcacctaacttttcgccctattaagactcgctttcgctccggctccgtcttttctgacttaacctcgctagataacgtaactcgccggttcattctacaaaaggcacgccattgcactttaatgtgctttgactacttgtagacacacggtttcaggttctttttcactccccttccggggttcttttcacctttccctcacggtactggttcactatcggtcactaactagtatttagccttgcgagatggtcctcgcggtttcaaccgggattcctcgtgtcccggcctactcaggattctgctaggcgtgcttgagatttcgcttacggggctctcaccctctctggcttaccttcccagataattcaactatctcttacactgccacgtcgcagtcctacaaccccaaatgataaatcacttggtttgggctctttcctcttcgctcgccgctactaaggaaatcgatctttctttctcttcctgcagctacttagatgtttcagttcactgcgtcttcctttgattagctatctattcactaatcaataatgcatctctgcattgggttcccccattcggatatctccggatcactgcgtacttaccgctccccgaagcttttcgtagttcgtcacgtccttcttcggctgttagtgcctaggcattcaccgtgcgcccttttctgcttgaccttactcaagaattctcttctcggtcgctctacaatctgttctctttgattgtctcggttttttgcttggattatattcagttttcaatgtactagctctttttgaggtactaccctcaaaactaaacaaagtttctcagtgtgcttccgcttgctctggatacttctcttagcattcctgctctccatatccttcgcttccttagaaaggaggtgatccagccgcaggttctcctacggctaccttgttacgacttcaccccagtcatctgccctgccttagacggctccttcccgaaggttaggccaccggctttgggcattgcagactcccatggtgtgacgggcggtgtgtacaaggcccgggaacgtattcaccgcggcgtgctgatccgcgattactagcgattccagcttcgtgcagtcgagttgcagactgcagtccgaactgagaacagctttcagagattcgcttgccttcgcaggctcgcttctcgttgtactgcccattgtagcacgtgtgtagcccaggtcataaggggcatgatgacttgacgtcatccccaccttcctccggtttgtcaccggcagtctcattagagtgcccaacttaatgctggcaactaataacaagggttgcgctcgttgcgggacttaacccaacatctcacgacacgagctgacgacagccatgcaccacctgtcttagcgtccccgaagggaactttgtatctctacaaatggcactagatgtcaagacctggtaaggttcttcgcgttgcttcgaattaaaccacatgctccaccgcttgtgcgggcccccgtcaattcctttgagtttcaaccttgcggtcgtactccccaggcggagtgcttaatgcgttagctgcagcactgagaggcggaaacctcccaacacttagcactcatcgtttacggcatggactaccagggtatctaatcctgttcgctacccatgctttcgagcctcagcgtcagttgcagaccagagagccgccttcgccactggtgttcttccatatatctacgcattccaccgctacacatggagttccactctcctcttctgcactcaagaaaaacagtttccgatgcagttcctcggttaagccgagggctttcacatcagacttattcttccgcctgcgctcgctttacgcccaataaatccggacaacgcttgccacctacgtattaccgcggctgctggcacgtagttagccgtgactttctggttgattaccgtcaaataaaggccagttactacctctatccttcttcaccaacaacagagctttacgatccgaaaaccttcttcactcacgcggcgttgctccatcagacttgcgtccattgtggaagattccctactgctgcctcccgtaggagtttgggccgtgtctcagtcccaatgtggccgatcagtctctcaactcggctatgcatcatcgccttggtaagcctttaccttaccaactagctaatgcaccgcggggccatcccatagcgacagcttacgccgccttttaaaagctgatcatgcgatctgctttcttatccggtattagcacctgtttccaagtggtatcccagactatggggcaggttccccacgtgttactcacccatccgccgctcgctttcctaacgtcattaccgaggtaaatctgttagttccgctcgctcgacttgcatgtattaggcacgccgccagcgttcgtcctgagccaggatcaaactctcattttaaaaagtttgaatgattgctcattccttatttaagatctttgtctcaaatttattgcttgcgaattgacttcgcttcttgtttgggtttttacacccgcacacttttagcgaaactttgttcagttttcaaagtactacctctgtcttgctttttttgcaaagcagacagcttttatattttatcaaaccatcatttctttgtcaagaacttttttgatttgttttttcgtcttactcaagctttttctgctttcacctgacgacatttaaatatattaccagcttatttacttctttgcaagtacttttttctttttatttgttttctttccttgcatgtctgtttttaagctctcgtcgcatctctcgaagcgactttattaatttaccttattttctccgctttggcaagtcttgctcttcgttcgcaatcttttagaaacgcttggacgcgctgtaattatttctttatttctatttcaatctacctttttctttttgcttactttatttttatccttacgcttattattcgagttttactgttttttctcttaattttagtacaaaatttttcgaaattttttcaaaataattcaaaaaacagtgttttgcctaatttttcactcaaaaatgcaaaaaaagacgtttatcaaattgatatagtcctactttagtagacagtacaaatatataaaattgtactatctatgaaagcaggactttttgtatgtctagaaaaagtaaatttagctatgaagctaagcttaaagcagttaaacaatacataagtggcgaagcatcacctgcttcaattgcgaaagttttaggggctggcaagactacactgcgccaatgggtatatgcatttaaagatcatgggccagaagcattaagaccacataaatataatcaaagatacagtaaagattttaaactcaaatgcatagctgcctatttaaatggcgaaggctcatatgattatctaacaaataagtttggtttgcgaagtgctgcacagttaaagcagtgggttatcaagtataatagtcatcaagaactcaaggactacaatcctattctggaggcttatatgactaagagaaaaaagacaaccctagaagaacgtaaacagatagtgaaatactgcaaggatcatcaatggaactacaaggaagcagctcttaaatttggctgcagctatgcccaagtatacaactggtcaaaaaaatacagcgcaaagggaactgacggcttagcagataggcgcggtcatcgtttaaaagaagctgagctatctgaaactcaaaggctaaagcgtgaaattgaacagcttaaaaaagaaaatgatattaaagaccaagagatagccttcctaaaaaaagtgaaggaattagaaaggatgtgtttgctggacagccaaaacaaagacaaatagcacttaaacaacagcagcgaaattctctttacagtttgatcaaagaatgtcaccgagaatataagtggtcaattgaatggatgtgcaaacaagccaatattgcccggtcagcctactacaaatggcttaatcataagccaagcaaacgtgaactaagagatcaaaagattcttaagcgtattaaagaaatagctgagagcaataacagcctctttggttctcctaagatgactttggctttaaacaatgagctagcagacggtgaggccaaaatataccgtagaactgtggctcgcttgatgtgcgtgaatggcatctatactagcaaggccagatttaataagaggtatcgctatcaagctgctagaccggaagaaactgccgaaaatctattgcatagagacttcaatgccactaaacccaatgaaaaatggtgcactgacattactgaagaaaaaattcctggaacaagtcaaaagatttatctctgtactatctttgatctatatgatcgtttccctgttggctatgctttaagcaagcgcaatgatacagccctagttaacgctgctctgtcaactgcttggaaaagagagcccaatagtcatgcaatgcttcatagtgatcgaggatttcaatttaccaggatgccttttaagcatgagctagaagaacatggcatgccacaatcaatgtctagaattggccgctgtattgataatggcccaatggaaggctggcaaggtttaattaaagaaatgcgagaagttctttatccgaaggcaaatagctatgaagagatggaaaaagcctttaaagcaagtattgaatactaacgcgtggtgctagttaaatcgttctagacaatatgccatattataagctaaaatagctatttctagccgttgttgaaaacctactaagctcctggctcgattattctcagcattgtaatagctaagcaaagaaaagtcgctttcgattgttcttctaattgccattaactgatgatcattatgctttttagcacccctcatgtttttacgatatggtgtccaaagcacgtatcccatacgctttagcttggctgctaagtcttttcctaaatagccttcatctcctaaaagataatggttaattggatgagcattgatcatcaattctaccgtctcttttgcatcatgtaccgacgccttagtaactgcgtagtcaagcagatagccatcatcactcactattgcgtggactttgaagccataatagtagatttttttcgtcgctttataaccaatatcggctatgccacggaagatcttaacgtgataattgcgaacaggctgacaaactggaatcggaaaactgtcgataatcaataattctccacctacctttacttcctgattccaaccctgacggatacaacgaattagaggcaagagcattcgagctcgacggttaaaacgagaatgagataagccaacgaagaatttacagaatcttcgttgagattcaattccaatttcagtttgccaaatgagcatcgctaagatagaactatcaggaagcttggtctgatcaacatttttacgatgtttaagtccatcaggcgcataaagcttatacagcgagcgacaaatcacatttaaccgattaaaactaacttgtaaatggtgagaaaaacgattaagcttgagatagttcaattagatcagactcttttctatttaaattacttacaacttgagtctagtctaattggacttttttattaactaaaacgatttaactagcaccacgcgtatttactagtattaattatgatcctcaggagcgcttcaatggcaagagcgcaggtcaggttagaaaagaagctaagaataatccagagaatataatttcatatccaataaaacaagataaaagatataaagacttttggaaaaagattgatgaaaagaaaaatcagctcgcacaatagcgaactgattaatcaaattaatttatatatttaagctgtctacttgacacggtacggatcaaatataatcattcgataaacgtctcattttatatctttagatgatcaatctttagtgtctattcatcttttttcttacgtttttcaacgccaagtaaactaatccaacctaaaccagcgagtaatgtaccaatcaaacctagtgtgtgtttgtgttcactaccagtttgaggcaataaatcttgcacggacttcggttttgcatttaatttgttagctaattgctttctttctgttttccctattgtcctcttgccagattcaatgtctgctgccttaactgggccgttagcgcgtttctttcgacctgtaggcataccttcatgcttaggattgttattagagtcatagcccttcttatttgctttagaatgattatgcttcttttcactttccttatttggctttgccggtttatctggcttcggctctggatttggttttggcttcggttgaggttctggttccggagtaggtacttcatcttgcttgtaagtaattttaatattactgtcagccgtatctactgaaaccttttccgctgccaccttactttgtgaagcagtgtagccactaaatgttggagcagtatatgcatcccactgagtattaccatctaccctccactcactgtatgtaactttgccagtaactttatcaaacgttactttttgcgtggtaatcagcttaccacctgaaggcgtaatgactgtaattattctagttggagtcttagtaaaagtatccaagtgatcatagttcttacttggatcaccttgcactgggcctgttggaacatcccttggtggagtttctggagtaacgataatggtgtcgtgttcaacccttacagttacagttggaatgccatcagcagttgcaactactgtcttagaaatatcctgtcctgaaacaatcttccatcctgctagagcttgtggatttacatctactgtttcactggtcttgccactaagcggagtttgccctacttctttgccatcactatcaacgtaagaaatcttccccgtttgagtgttgacagtataagtagcagtgacttcactattggcaaccagctttccagtaaccaagtcatatacggcagtccgcgtaaattcaacggtctgtttcttttgatcttctgaaatctgagctagttggcaattcttgatctggtgctaactcgtagttctctggaagcttcaaatcaaggttatcaacagttgagccagcaacgccagacttagtaattgtctgaccaacttgcttgttaccttcttgagtatcttcaaattcaatagttaaagttgcatccaaagtaaacttagcctttgaagaaatattcagcttgtagtttggatttgctttttcaagggcagtaatactttctggagttaagttaattacataaacgccagattcagctggaattccatttgcaaattcataagtcaaacctgccggaactgtaatagcagttggaacattaactttaaagtttgttccatcaattactggtacagtgctttcttgactaccagaaatcgttacattttcttcagctggactaattacataagtgaattgaccactttcagaaactgcatagttaggattatcatcttgcaatttcttcaatcccttagcagttaaggcaatgtagtaagtaccggcatttgttggcgcagaaattggcttaccattggcatcgacccattcataatcaccagctgctaggttagcagtattcaacatttcaccgcttactaaaccagttggagtgaatacaccgaagttggtagcttgagtgttaatcgttgcaggttgaccatcgtacgtcttgccatctgcgcccttactattaccgtcaagaactacattaagatccttttgtttaattgtgtaagtggcagagcctagcaggtcttcagcatccaaggtgacatttccttgaccagcgtattggttaagggctttttgcaagttaacaataccattggcactcagcttaatcgtgtaagtaccatcattaactggtgcgctgccagcattccaaatataatcaccgtcttgcagagcatacgtactttcggtagttgaacctgggaaagtaaagtgaactaaaatttgaccattgctgttaacttgtgcagttgttacagctgtaccatcaaatgtcttttggttagagccattaagttttgcgtcagcagtggctgcagtaactatgtagttagctgttgtcttaaatgtccacttgtagttagcaccattattaccagttagttgcttaagcttttcttgaccagcctgtgacaatttaacttggtaagtaccgacattcgttgcattaccaacaatttgcaaatcgtcagcagttaacttaagtgtctgagcttcaccatcagcggagtaaaccgtcgcatcgtaggttacgttgtacttattcaagttaagtccacttggtaaggtttgcttagcatcataagtcttgctgtcaccactattcagggtaacagtagcttcgccctggttaatgtacccttagtagttacatcagctgctacttgtgggtatgcgtagttagtacccaaagctttttcaatgttagccaacccttgcgcagataattccacgtggtattcaccgacattgcctggggtttgatcaaagatcaagtcaccatctttagcagtgtagcttaaattagtactattagtactaattttaccatacgtatatttacaacaacataatctttgcctggatcaggaacattaacttgccaagtttgtccagcttctttaggtagactccatgaaccagaaatcactttaaatcctggcgttgttgaatcacctgctgtttgatcccattgccaattaccataagtaatcgtgttattagcaacatttaaactaccagtctgggcatagaatacctgtatttgtgaatcaggtgcaaattgttgaccatttttgtcaccaccagcaattacatatttagccgttactgttctcgcttgctgttttactggaatatacaaaacagtgtgaactggacgggcttcataaactgaggcgttctcagtatatgctagagactccttaccctcactagatgtatcttccttattccaagttgggtaaacaaattggtttgctgacctggatcgccgctcttattgtaagcactataagaaacttccttattattttgagtagaaacatctttagtatcttctagactagtagcttttttatcttctgcctgtttagttgaattctgctcggttgaatttttgctagtcaaaggatcggtaccgctaacttctttttgagcagtagtatcgttatcattcttaccagctgtcgtagtctgatcatttccagtatctgtggtagtcttcttagccgactcaacctcttctgtttctactggatccgtagtatccgcatgaaccgtttgacttgtattcatcgtccaaagcaaagttgaaagcaaaacggaacaaactccaatgttcaattttctaatactaaagcgctgcttgccttcaaagtcatttttatttagtctttctattacgcggttttattctattcatctattttaacgcctaacataaatcacaacaaaaagcaggcttaaattatatgcaaaaaaatcgttattttaagttgtcagtcacaacaactaaaataacgattttgcttttttaatctttaattacttaaattaaacctgattccttagtaatcttcttcataccattcatgtaaggaacaagtacatcaggaacagttactgaaccatcttcgttttggtaattttccaaaatagcagctacacaacgaccaacagccaaacctgagccatttaaagtgtgtgccaagtgaagcttgccgtcttcatcacggtaacgaatttgtgcacggcgagcttggaagtcagtacagtttgaacaacttgagatttcacggtacttgtcttgtgcaggcatccaaacttcaaggtcgtaagtcttagcactagtaaaacttgcatccccagttgaaagagcaactacgtgatatggcaagcccaacttttgcaataagtgttccgcattatgagttaacttctcgagttcatcccatgattcgtcaggcttacataccttaaccatctcaaccttacggaattcgtgcattctgatcaaaccacgagtgtcccgtcctgctgaacctgcttcacttctgaatgctggtgacaatgcagtaacattgattggcaacttgttttcatgaataatttcatttctgaagtagtttaccaatggaacttcagcagttgggatcaaagttaagtcacgtggcttatctggatcgtcattatcaacgatggtataaacatcttcgtggaacttagggaattgaccagttccttgcattgatgcatcgtttaccaagtatggtgggataatttcggtataaccttccttagtgttttcatcaaggaagaagttgaagacagcacgttccaaaagcgcaccagcaccgatgtagtaaacaaaacgtgcacctgaaacctttgaagcacggtcccagtctaagatgccaaggtcagtaccaatatcccagtgagcctttggcttaaagttaaattcagtagttgggtgccacttacgaacttcttcgttgtagctatcgtccggaccaattgggtctgaatcagctgggaagttaggcaatctaagcaagatgtagttttgcttttcagttaattccgcaacttccttatctaagtctttgatttccttacctacttcacgcatagcagcaattgcatcgctagcatcttctttgttacgctttttttctgcaatttgcttagaaacgtcgttacgcttagcctttaattgttcactcttagtcaaatccttacgacgcttagtgtcgatttcaactaattcatccaattcttctggcttaatgccacgcgtagccaatttcttctttgaccagtcaagattctcacgaatcaccttaatatcaagcatataaaacctccatgatatgcataaaaaaagagccgacttatccctacacttgggacgaatcggctcttacacggtttcgcggtaccacccagcttcagtctatctagactgcacctctttaccagacgagtaacgacgtcaaaccgtgcaactattaattgcccacattattgaaatctggaagcgactatgcattcactcgcaccaaccgtgaactctctgaagcagtcttaggatttcgtgtttgcatttattttaagccattcttcttttttgagcaaataatatttttctttaaacgaaaaaagtgcactaacttgtgtgtaatcgacagtataaacatactgaaatcctagtgttttaagcaatttctgtgatttttcattatcggcaaaagttccagcccagacttctacttgctttttctttttaaaagcataggtcaaaatcaatcgtaaagcttcagtcatatagccgtgaccttcaaacgactgatctagcaaaaagccaacttctttagtctttaataggccactcttttcatctaagccgcgttcatacaattcaaccagaccgatcacttcattgttcttgcgcaagcaaacgacataactttcaggacgcgacatatattgcttcacgccattaaccgcctcagtcagattgcggtattcctcaaagccagccatcttgtggtagcggggattgccaccccacttcagtaattgctgcgcgtccctttcttcaaaaggtctcaaatatattctcttagattcaagcattagttacccatcagcttcaagagccactttgcaccaaactgtaggcctatactataggccgcaattgtccatggcttacacaaaataataatccaaaaataagtccaaaacttcattttagtcaatcctgctagcaggcaaagcacgtcatcgggagctgctggggcgagaatacataatgcaaagaaccaattaaatttattctgattctctgtccacttcatatatttatcaagcgtttcttccgaaacaatatgcaaaataaagggccggccgtagtgtctagctaaaaagaagttgataattgagccaatacaaatccccacgtagttataaataaacccagcaactgggccaaagaagaccacgcctcctaataaagacacgcccccaggaataatcggaataactacctgaacaatttgaatcaacacgaaaataatcggaccaacaatttgtttattagccagataagcccgcattttagcttgatcggtaaagatccccaagcggtaccaataaatcaccagcaacacgattgcgactccacaaactatagttgcaatattgattaatttacgactagccttagtcgatagatgcattttctcgccttccttcatcgcctagtagttcaattttaacaaaaatccagcccagataccgtaaacatgcaaatctaaaaaaagttttattattttagctactttgggcagatactatataataaagttaataagttattagaaaggtaggcatcttatggttgtaattaagaatgatattgtttatgacaagactaaagaattaaaaacggatatttactatcctaatgatacatcttctaataccaagattttaatcttctggcatggcggtggctggtttagaggtgataaagacagcgtcaaaaatctaggtattcgctttgctaatgcgggctttatgaccttcatccccgactactccttagcacctaaataccactttcctgctgctcatgaagatgcattgcactttgtcgactggctgttgaattctgaatacactgatcaagacgatatcaaaaacattgttcaaattggagccagcgttggcggtgaaatggcaattgaggttgctgggaaatacggtttccctactgtcacctggtctgctccagttgaatattcaaactggattaaagatcatcaagatactaaagcatccccagatgccgctaacgattttggcattaccgatcctgaaaagatcagacaatctttctacaagcacttcacattaacctacacaggtactgaagatgaggctgtattacaaaaattagacgctaagtcatttgactatagccatctcaagcaattaatgatgattaattccgcagatgagttgacaccactagctacagtattggattttgttaagttcttagctgacaaaaacttaggcgtacagctcctcgtaattcctggtcacggtcacgccatggcctatggtcccgattatgtagacgaatcgctcgattttttatatcaaactattaagagacaaaattaagtatgattaacatccaaaaattcgttcaagtcagaaaaaaactaaagttatcacaaactgagctttgccaaggcatttgtacccagtcgaccttaagtaagtttgaaaataatgggcaagtgccttcatttaaaattctcaagcagctttgtgaacggatggatattgatgttagcgatattatggacagcagtgagcacaaatatatcgcgcatatcctgtttgaagcggattttgcttttatcaattttgattacagtaaaatttttactttactttcacaaatcaaccccgaagtagacctaaaacgccaaacaaatcggattcattatcactatttgcgcggacaatatgctctaagaagtgatcgcaatcaaatgcaatgtcattaagttaagacattgacaattaatattagacttttaaagcactgatttaacatttaattggttaaattggtgcttttttcgtacaacaaataaggcatagcacagattctgcttttttaagctacgcgatataaataatatacagctgatttgggcttaatatttctcttgtccttgcggcctggtctaattggaatggtataatagctgatctgaataaggatccgttcaaaatcttgcgttaaagaagaagccaaatacatgctctgaataatcaagcatgattgcttgaaattgatggcatattgatacttgcaatgcttttgcggaatataggcctgtgcatcaatttgactgattgcattaaacataatcatatgggcataaatttccatttcaataaatttatcttgtttggaatggaactgtacactgcctaaagaatacttcaatttcttgaaggaggtctcaataccccaacgcagatgataaagctctttaattctttttagcggataattttttcgatcaagattggttagcacaacttcccattcttctttgcctgatttggcatcattaattctaaatttgcaggctcgaaattttattgtgcataactcgccaaaatcccagcttagatcctgggtatttttagagcgatacttaatatattggcgataatgatgctggacatggtgaatattctcactggctttatgcgtgatgtagtaatagttagaagtagttaccaggcaggaaatctcacgatcacattcttgatcaggcaatgtcgttatttctttaactccgccttgtccagccttagttcgtattatgtaatgacagttaggcaggcgattgcagttttcaatcatattgaaactagtgtagccacgatccattgttacaatatatggaccacaattcaaagctttaagcatttgaacagccgctttgcgttcatccatttctgatttaggctgaaaaatacaatcctggtaggtattattcaatagatcatataaggcattaacgtgaatttgacaatagggtttctttttatgagaagaagcttgtacaatgttattcgatttcggattccagatttgattaaagtcagagccatcaatggcaaacaaacggtagtgatgatcaaaaagttgaatattaaatagattttgattaaaaacagtcagaatatgtttaaaacaagcaggagaaagctggcttttgcgttgaacataggcagaagtactaactactttatcgttctttttagttgcatcttcgccaaaagctctaaagagttcactgtttaaattctgaccttgcatgttaattgtagttttaaggactgtcgctgcatctaaagtgcgtttcctggtaaaagcatgaggattattaataaaatcgtgaatatgatccccagtattattgataatttgatcaagacgttctagaatattcttatgaagggctttcataattaacaccatctttctggcaataattttgaaggtttaaaatatataatatataagataggcgaaaaggctggtcttttcgcctttattttatacaaaaaaagagatcgaatccaaatgattcgatctctaaaaaagcacccttaattgtcaatgtcttaacttaatgacattgcaatcaaatgagtgcgctcttttatttcaacaatatcttgaccacccaggaattgcctgaaaatgatatttaccgcttgttggcattaaatggttgtagtcaaatctatgctaaacaaggtgaaacagagaaagccgagcactattatagtcaagtattaaagaacattatggacgtcaagatcgataatattttgactacaatgcatgccttaagtattttatgtgatgccggtgaattctatggcgaacgaaaaatgtatcgtgagtctaatgcattattgcgctatgcctataagattggcgctgagaagcacgtgattttttacatggcacgcatcctattgcggcaaggcatgaatgatattgatcagtcaaaaaagaaagcaattgctatccaacatttgcacgatgcctgtgcttttgcccgaatcaaccgcaacacgattacgctaaatcaggctaaaaaattactaaaaaaattaaatgactaagatccaatttgaaatatagtaataagagtttgttcatttgattttgcaaaaatgataaaattagtataaatgaacgctgtttaggagtttcagataggttgactttggaacgaattatcaagtttatgtttgacagtattggtagctatttatccattcgaaaaattgccaatacgttaacttcaatgggacataaaatcacaccaaatacggtagaacggtatattaatgcgttactcgacagtttgattatctatgacgtttcacgattcgatattcatggaaaagagcagctaggttcgctaaaaaaaatattacattacgcgtggtgctagttaaatcgttctagacaataagccaaattataagctaaaattgcaatttccaaccggctttgaaagcctatcagactacgtgctcgattgttctcggcattgtaataggtcagaagcgaaaagtcgctttcaattgttctgcgaatagccatcaattgatgatcattgtgctttttagctcctgtcatatttttacgatatggtgtccaaagttcgtaacccatttgttttagctgttgatgcagttctttgcctaaatagccttcgtcgccaagaagatagtaattagatggatgggtattttctatcagttcaactgtctccctggcatcatgaactgatgcctttgttacgacataatcaagaatgtaaccgtcatcgctaacaatggcatgaactttgaaaccatagaagtaaattttcttggtggccttataaccaatgttggcataaccgcgaaaaattttagcacgatagtttcgaattggttggcaaacaggtaccggaaagctgtcaatgatcaagaactgtccattcaggtcaacctttttattcatttcttgccgtatctgataaatcaattgcaatagctgacgtgaacgccgattaaaacgtgagtgtgataaacaattgaaacattcacagaatcttctttgtgattcaattcctgtcttagcttgccagataagtaaagccaaaatcagactgtccgtagttttaatttgatcaatatttcgccgatgagtaaactcagccggtgcatacaaacgataccagtgccgacaaattatcactaaatctttaaaactaacttgtaaatggtggctaaaacgcttaagcttaaggcagttcaatcagatcagactcttttctattattactatttacaagtcgagtctaacaagattggacttttttattaactaaaacgatttaactagcaccacgcgtattacattgttgatactgggcttagatatcatttgttggcaaatcaaaaaaagatcgtggacatataattgaaaatattgtttatcttgagttgcttcgtcgtggatataacgttactgtaggtagcatccctaatggtgaaattgattttgtcgcaagaaagaataacgaaattttttattatcaagtgtccgaaacagtgctagatgaaaagaccttagagcgcgaattgaaaccgtttaacaagattaatgatcattatccaaaatttctattaacaatgaatgaatttggcaaaaatgataattttaacggaataaagcaacttaatattttagattggttattagaataattaagctaagattaagaataataatttaaaaaaagaattcgaaaaatccccatttgtagtgaaaatgcctacaaaatggggatttttttagataatcttgtaaccagtaactggcttagcaggtactgtattgaaatcaaagctagcaagtttgtccagttcagtattaccatcaataattgtagtaacaccttgagcaatcatcaggttcattactttatccttgtctagatccttagtgaaggttaccaagactacaggcttatgcaaagcacgcatgaaaccaatttcaaaagcactaccatcatctacattgtccatgtcatacaagaagacgccacatgtagagttaactagaccttccaggtcattgttataagtggcaaggcgccaagtcatgctgcgaatgccaccaatttcaggattcttttcatccggatcaacaaaattttgatcaaatggaaaatgcactctgaccactgtcggattttcttctaacaaggcacgagccttatcaactcgagcacgttgatcatcattgtaaaatggagtgcctaaataaaccttagcagttgaaacttgtttgttcatgcttttgtcccttcaatgtttaaaacttacaaaataaaattatttttcattttagcatgacttttttacaactaaaagcacaaatagctgtgttttcattgtaaacgctttataatagaaacataacttattaaagctaaacataaaacttattggaggaattattttgtctagatatcaatcaattaatccatatactaacgaagaatttgcaagctatgacaattctactgccgcacaaattgacgatgccattaacttagcacacgctttatataaaaaatggcgtcatgaaaatcctgagacccgcagtcgtcaattacacaagatagcagatgctttgcgcgagcatgaagatgacttagccaaaatgatgaccctggaaatgggaaagcttttgcgcgaatcaagagaagaagttgaattatgtgcttcaatttgtgattactatgccaaaaacggggtcaaaatgttggctcctactccaatcgaatcagacttaggcaatgcctattatttgaagcaatcaactggcgttattatggcttgtgaaccatggaatttcccactttatcaagttattcgggtcttcgctcctaactttatcgtgggcaacccaatcttactgaaacacgcccacaatgttccaggttctgctgctttaaccgctaaaatcatcagacgtgctggtgctcctgaaggcagcttaattaacctttatccaacctatgatcaattaagcgatattattgccgatcctagagttcaaggcgttgcattaactggttcagaacgtggcggttcagctgttgccgaagctgctggtaaaaatttaaagaaatcaaccatggagcttggcggcaatgacgcatttatcgttttagatgatgcagatccgcaagtattgcgtaacgttttaggcgatgctagaacttataacgatggccaggtatgtacttcatccaagagaattattgttgaaaaatctcattatgaggaagtgctacatacgcttaaaaacgtcttttctaatcttcaagcgggtgacccacttgaagccggtactaccttgccaccaatgaattccgaacgtgccaaggaaaaattagaagctcaggttaaaaaggccgttgacgcaggagccgagattttttaccaatatccagagattgattctaaaggtgccttcttcagacctgtaattttgactaacatcgacaaagaaaatcctatttatgatgaagaattatttggccctgtagcagaagtctttgtagttgacgatgatgacgatgccattcagcttgcaaatgattctagctatggcttaggttcatctgttatctctaacgatatcaaacgtgctcaaaacgtggccgctcaaattgaaactggtatgactgtcatcaatggccgctggattacctctggtgaattgccatttggtggcgtgaagaagtctggctacggtcgtgaattaagtgacttaggcatgatggcctttgttaacgaacacttagtaattgatgttactaagaataatcaatagtaatttttcgataaaagaaacatactaacctagtgttggatcatgaatcgacggattcacgatctggcactttttattttgtctaaaatagaaagtgaagataaagcaaatcaagtcttcagctttttagacacttgatgtcgtaaaagaaacggactgctttaccacctattcttaagtctcttcgaagtctgtgggcacttagatgccgtgtttagaaaattagaattaataggttgataaagaggtttatcttcacagcggaggttatattatggaatcacaaattattttcggtattgatgttagcagtaaatcttccacagtttgtgtggttaatgaccggatcaaacaaggcgaatcttttagaatctctaatgattcctttggctatcaaaaactttatgagcaactgaaccaatatttgataactcctttagttgttttcgaagctactggtgtttattctctaagcctgcaagctttcttagaggattatcatattaagtatttgaagcttaatccgcttaaagcgaaaaagctaatggacaataatttacgccataataaaactgataaggtagatgcttatcgcctggctttaattcaatttaatgccccgcaaaagttgcgtgatccacagcccagagagtatcatgaacttcagaatgccagtcgctattatgaagaacttactaggagtatagttactactaaaaatcaattgcaccgcaacctccaatccactttcccacaaattgaagaaatactgtctcatccatctggcagaatttattgggcgcttgttagtcttttcccacatgctggatatgttctagaaaagaatgagacacaggtaactcaaatgcttaattctatttctggaataggacaacaaagggcacggtacttaaccacaagattatacgcttttgctagagaagcttatccttatgattccaaagatagtattatcgttagagctattcaaaggaacatttctaatttgttttcactccagcaagaacgcgactatgtaattaactacatggaaaagctggctaaagcagtaaacgctcgtgctttatccatctatttgagtatcccaggggttgctagaattacagcagtgagattagtagcagagctcggtgatctaagacggtttagcacttcagctcaaattgatgcgtttgttggcattgatccaggaaggtaccaatctggtgaaaaagacagttctcttggcattaccaagcatggcaatcatattgccagaaaaatactttatcgagttattattcaaatggagacggtaaaggctacgcagccttgccatataactgattattatgacaagaaaaaacgatcttcaaatagccaaggctataagaaaatcgccattgcatcagtccataaactgatacgcacaatgtttgctcttatcaaacatgatcaattatatgattacaacatagccaccaaaaataaaagactttagctgaaatcaaataatcaacttaagtataagcaacctatggaaaaactacaagtattcataggcttatttgtggtactttcgctttttcttaaatttaaactcttatttgctttaaccttattcgcatcattaaaacaagtaaatttattttcttaaatcattgataatacttgactttgggtagaaaatacgctggcaacttaaccagcgtatttcttttacttattattaattctatttctttttaaaaagattatatccagccaaaatcgtggtcaacacgctagccaaaatcataaagtaagctgaagctccgagagaaactgcatatgacataagttgactcgtcaattgagccagcaccccagttgaagcatgtgccgcgcttgatatttgaaaaatcatataaatcaaaaagattgattcaatcaaagaaaggaagaaggccaaagtctgactagccttagtatttttcaaaatattataaataatgaaaattgggaacaagaatagtagcaaccagacaatgtaaagaataagtgcataccatgatgtcacgccagatgaaagcaagcgccctgctaaaccgaacagtacattggaaatagacattctctgcgtgtaagccgaggcacccgagtcggtaaagagaacgattagactaactaaagccgtaaaaataactgaaatctgcacataattaaagtgatgtttgcgaacattttttatttcacgtacatgattttcaatccgaggatatttttgcacaaattctcggtttttcgctttgactttactttcacgtgcatccacccggttaaagacatcggaaccaattcggtcaatcttttgcgttaatcgcttatcaaccgtatactgctcgatcttatctttacgatcacacacaatataaagccaaaccattagggctaaaaagccagtccaccctgccgctctagaaaaactcattaggattaaaagtaagactcccaataagaagactaaggtcgcatttttcctaacccacgcaatcattctttggacagtggtgttttgcttttcaggaataaattcttcccgataggctgcacggctgataatcttttcgccttcatctggttcttcaaactttgctttttggtgctgatctgtgaaaaagtcgtctcgatatttttttagattgaagccacagtttggacaaatatcatctgtttcactaattttatggccacaatttggacaagtagtcatataaaaattcccttctttttcaatctgttagtcattattataacatgtatcagaatttgaagatcaaaacaaaaaaagaccgaatcattgcgattcggtcgaaaaaattatttactaactatttttcaacattaattggtaaaacattatcaatataaggtgaatatccatcagcaatcaaatctgatatctttctcaacattggaaattgtatgttcctagtatcatttccaaacttttgatatgcttctggagttgcatctttatgtaataattcatatcctaatcttttgtagaaattaacactttcgtccacagattcaagataaatcagctgaacacctgtatacaatgcaatcaccatgcacatggaaaagaattccatcattagtgctctaccaattcctgttccttggtattccttgtcaattgcaaaataagcaaggtttatatatggtgtatcaactttataagtaccatcatccttcttaacattctgtgttaataaccctactgttgacgagaaaaaaccaactatctgatttttgataggatccattaatacaaaagtctttaatttctgtgtactttcgaacttcggacattccttacgaaaaaaattatctataccacgattagtggaatcaaaatgtagggctaactcttcaaaatgtggacacgtacttaacgggcataatttaaatgctctactttgattcatgcttttccttcccacgttgaattactatcccatcagcttcaacttctttttgcaacttttttatagacacacgtggtactggattggctattttgtttttgaattctttaaatgctttttcatttttaaatgttatctcagcatttctaacaatacctaccataattaccaactccttttagtgtacctattaatattatacaatcataatctgttttactattagtttcaagatttattttaacaaaaaaagaccgaatcattgcgattcggtcgaaaaactatttattaattatttttcttatttcttcttttggcgaacttattaaggtcaattccctcatatgtcaacttagtagctgctgacatagtaattggcaaaatgaagaccaagatgagcaaaccaatatccacggctaaggcaacttcaatcaaagttggaatacctgatggaatcaaggctgcaaaagtaccacccaagataattgcggctgatataacaaccgtaccaatgatagcacatgccttcaagattcttgaacttggagtagtgtatccttcagactcaagttcacgataacgagtcatcaggaagatactgtagtcaacacccaaagcgatcaacataatgaagctgaagaatggtgtgttccaagtaagcattgacttaccaagaactgctttaacaatccattgattgattgaaagtgagcagagataagcaataagtaaagtaccaagaatgtagactggttgcaataatgaacgagttacgaacatcaaggcaatgccgataccgattaacatgatggcagcagttctaaggaagtcgccactggcaactgtcttagtatcttcaatcttggaactttgaccacccatagctaccttagcattcttcaaagcagtaccttggaatgacttcttagccatagcacttaattcttgtgacttcttagtagcttcggttgcacttgggtttgaatcaaagacaacaataatttgagctgacttcttgtctgggctgaggtaaacatccattgacttcttgaacatatcgttcttcaagaattccttagggatgtagaaagtatcagcggcagctgatgaacctaaacctctgaggtaggtttcaccttgacctaaaccactattaacagtgtcaatacctgaagtcaattgtggaactttgcttgccaacttaccagcgccagcactgagttgtccagcacctgtgttaagttgactgatacctgaaataagttgtggagcttgaccagctaattggccgataccactgttaagctgaccggcaccatttgcaagtgtgccaagacctgtgttcaattgacccgcgccattgttaagtcggtttacacccgcaccaagacgactagcgcctgacgaaagtgaacctaagccactgcttaattgaccagcacctgaattaagtctttgtgcgcctgccacaccttgtgaagcagctgattgaacttgcgtcaagcctgagcttaattggttcaaagcagtagctgcacctggaagtgccttgttagaagcttgagctaatttagctacttgagtctggagagttgataattgttgaagtgatgaagttaaagcacctaattgtgagctaagtccagaaacatctatagcagcattacccgtttgagtatcagcttgtgtattactaaatgccttattaatagctgcttcagccttttgctggtcttcagtagttaagccagcactgccaatggcttgaagtgctgctcgttttgcttgtgcctgagcaccagcagctttttgactagctgctgacaattgtgctgcttgttcttgtaacttcttcaaacttgcagttaatcgtccaacttgtgaagtatctaatccactaacagcttgattcaattgttgaataccactgttaatttgtggcaaagcagtttgaagttgagcgagttgttgtttgtttgaaccactcaattgagttgaaagttgtgaactcaattgttgtaattggttaaccatttgttgggtaccactttgcaagctgctagcaccattctttaagcgatttgcaccgctaactaattggcttgcaccactttgaagtgcgtgagtaccacttgccaaacgaccagcacctgtttgtaaacgtactgcaccactttgtaattggcttgcaccattttgcaaacgactagtaccaccaactaattgttgggcaccactttgaagacgacccgtaccatcttgaagttgatctgcaccatccttcaaactattggcaccattagcaaccttgttggcacccttactcaatttgcccaaacctgaacgagcttgatcaacaccgtcgttaaccgtgtttaattgattgttgacataaagcatatcaattggttcgccgtaaggttctgtaacagatgtcgcaaatgaaacatcttttgaagcttgaagttgcttagtcacttgatcaattaacttcaaattttcttcattgtctaatctatgcttgctttgaatgtacaagtatgatggttcagccatccctttagagaagtgcttttgtactatcaacaaaccttgcttagatggaactgaatctgcaatttcatcagtgtcatcgtagttcaagtgacctgagtacattaacatgaatggcacaacaacaactgctaacacaaccaagtaaataattggatgcttcaatatggcagatgaaataccatgccataacttgtcatcactttcaccagtaaatttcttaactggccagaacattttcttaccaagcgtagccataaagaatgggttgagtgttaaaagcactaccaataaaacagcaacgccgaccgcaacaccaacagctgattggtaaacggagaatttagctaaacttaaagcagtaaaaccaattaagatggatgaacctgagtaaagaattgttttaccagcattgcgcaaagcgtcatgcatggccttatacttgtccatcccttttcctagattttctttaaacttgtcatacagcaaaatgttgtagtcggtaccgataccgaagagcacgataaccataaacacttgcgtaaagtttgaaaatgggaaattggcgcttttaactaaattagtaacaattgagaaggaagtaaggaatgaaacaccaactgtcaacaatgaaataagtggaacaattggtgacttaaatacgataaccaaaacaataaagataaagacaactgtaatggcttcagtcttcttaattccctcttgaattgaagcggagaaggcgtgctgcaagacatccgcacccgttacataagtacgaagcccttgcgttttcgcggccttgttcatttcgttataaactttttcaatcgtaccatgactcttagccacattaaattgtgctacccaagtcgtgccatcttttgattgaagtttctttcttgtagcaatattggaatctggaagtaatgaatccttgattccgtacttgcttttatcattagtgaacttatcaagcgtattattaatagcctgtttatcggcatcagttagcttgccactctttttgttaaaaacaagtgctactgcataagtgtttttctttttcgagccccaattgttctctattgactgtgccacattgctttgcacattacttggcaacgtaatgttagagtgatcattagtcagctgcgtaatgttaggcaaagcaacaacggaaataatcaatattaaaatccacgcaatcagttcaaaaacatggttcttcagaaatttctgcactttcctatttcctccctatttgttgtaaatcaggtactggttctacaagccgtaaaatcatttcatgataattacgattagattcatcttctgtttcatctccaaaagacttcgatttatccaaaaaaacgtaccctaatacggcgccaattaaagcatgaaatgaaatgacactttcttttttaaaattaagtctttcacccattttaattaaatccaagatttcttgattgatggccgcatcctttggatattcgttcaaatgatacagaatacttgataaagccggatcgcttaataaaaagtcgcgcacaacatccgcaaacttaagcaatgcatccctacctgacataccgattagatcgttcatcaactcatgacgtaagatcttaatctgtcttgcaccaactagtgatagcaattgtttgcgtcctgaaacgtaatgataaagcgactgtgagcggacatcgagcgccttagccaatgctggcaaagttgtagctgtcagtccttttttagaaattaattcagtagcttgatcaattattttatccagatcaagatttcttttctgtgccattttcatccctcctttgtcttagcatagtaaataatatacacctacagtgtgaagattacaatctacatagtgtaaataatttattttttctataaaaaaataatgaagccttctcggacttcatcatttccgttacttatgcttttttataaaccaagcattaaccgttttgcccaatttattaaaattcttgtgttgcgtgctccaaacagacatacagtaagcacgtccgttagtctgaacaattgcgacagcaaaatcatcatcaccaattgcataaatgccgccacttaagccagaaactaaacttggtcgctctttagctagggttgctaaaactcggctagcatattgccgatttaatacccgaccttgatacaagccaatcattgttttagctaaatcattagctgttgtctggccagtcatatttgagttgaccttagtttgagtggcacccatttttttagcaacttggtcaatattattaactccaatttttctagttaaggcactagctgcagttttgttacctttaagcattgcgctacgcaaataacttacaccataggtaataccaacttgaaacatcttatcacccttggctttgtcttttttgctaatcttaatcgcagttcgcgaccccatcttgcctttttgttcttgctcatacaaggcgatcagtaaaaataaccgcattgtttttcctgcgtcatgagccttattagtattaaaaactacggcaaagtgactagagttagttaaatcctgtgctactacctggaagctatcatcaatgcccataacttttttgatttgcttgactagcttctgattactgcctttttgagctttaacatggttagaatattcaatcgaattaaccttgggctccttaggcttttctaattttttaacctttggctccttggtcttctttttattcttagcgaccttgctgttatttggttcaacaatctttaactgcgcgttttccacccgctttatgtttgatgtatacaaaatgaatgcaaataaagtcacaattaaagaaccaattaatattttatgtttcattaaaacgcctcaattttagaagaaatgatgccttttcatcaaaatgactaaccaaaccattaaaacaaccatcaaaataatgattaaaacccagtcaaatgaattttttaaaattggtagactaacattcatcccataaaaaccggttaaaatagttggaatagttaataccaatgaccacacagttaagaattgcatggtatcattcaaattattgttcatcatattattactggtagctgataaagtcttagttacctgctgggaaatctgcaccatttctgcagactggcttgattcaatcaagacgtcatccaagcgttcactggcttctttagtgaagtctaatttgctgtgattcaggccatgcaacatgattaaatccgtctgaattgaacttgataaataaactaaacttttttcaatattcgaaagttccaccaaatctttattgttaatgtcatcagacaacttctgatctaggctgttacgttcaacgtcaagttgcgttacagcacgctggaagtattgtgatgaatataggaaaaagagcatcaacaactcagtaacatctttagcttcagacaaacgctcccgcatatgttcatcgttgaattcatcaaacacatagctggttgattctgtatggaaagtaaagatattttcacccactactaaaaaagtgattgggtgtgaggtaaagtgcttaatcgtgttggtcggccaaattggcacatcgtaaacaagcaagtggctcttagtatggacgtcatagtcatagtgaggacgttcgtgacggtcagaaatataagagataatgtcaggcgtaaaattaaaatcctgctgcaatctctcactgtcttcttcacttaaattattgatgtcataccacttatactttgttcttaccggaaaattttgttgtctaatcaaccagctcacctcaacttttattttattacctagtaaatggtaccatttttctcaattctttttccacaaaaaaacagaccttacggtctgctctttgaaatctaattgctatttaattttattgcttccaagcagcatcaaatttttgcttaccagtattaatttggatgttagtattttgacccttttgggctgcagcaaagatattttgcaaaatgctgttcaattggttgtatgcagcatttgaattcttagcaacaggaacactgtacaagttcttcatagcatcttgaagtttagcaggaagcttaatgctcttgttattcttgtattcactagattcgattgcactattgtttacaggaatgtaaccagtagcattagcccacttaatttggcttgacttagatactaagaacttaatgtacttaaatgcagcagctttttgttcagcgctagcgtggttaaacatgtaaatatcagtaccttgttgcatggtgtatttgccaggacgtggagcaacatcataagtaaacttgttacctacaccttgcttaacaaagccttcacctgcagaagtaccaacaaacattgcaaccttttcgttagcaaatggacctgaaaggtagtgttctgaaccagctactctgaagtaacccttcttaataccatctgcatagaagttgagaactttctttgaagttgaaccactgaagttaatcttatcagtaaagttcacgccttcgtccttcataccaagagtgtagtagttggatagtgaatcaaaaccagcacctacaactttgtggttactcttcttgtagatagtttctgaaacatccttaagttcttccatagtagttggaactttcttgatgccatatttcttaaacatggtcttgttgtaagtcaaagtttcaattgacttgttaaatgggataccgtattgagttcccttaatttttgcaccatcaagaagttcagttctaatgtcagatgcctttgcactgccccaaccaacattcttgttgttgatatatggggtcatgtttacaagcatcttgttttgagctgcgttccaaagccaacctggataagcttgagtaatagtaggtaagttatttggtgattgcaaagttgagttgatcttagcttgcaaatcattgtatgcaccttggttttcaagcttaacagtaattttagggttcttcttttcaaattcattagttaattgctttaaagtagaaccttgtactcccggcatagcgttccagaagacaactgtagtcttcttagtaatctttgatggaatcttctctgaacttgatgaagaagaattgccgctctttgaacaagcagcagtgccaactagggccaaagtagcaacggcagccatagtaagtttcttactaaacttcatttggataaatcctcccaaaaaataaaactaaacaacaatatgtttttgatttactaaagcgtgattgtttgaccacgtttaggtaaaatccgttctccatatgggttctcttccagctctggatgcaatgtgtgcaccggtactaaaacagctggttgaaccccagcaatgatttccttgagttctttttcatcggcatggcctgaacagcgcaacgccttatactcaatatcattgttagctaaagcctctacaaatggtttgtaggcaggatcaaaatcccctaatggctcagcatttgagtggatatacaaaccacccttttgcagcttatcataatcggtgacaacttgccacatgtatttatgattatctgctaaaagctcatcatagctaacttctagctctggcttaaggtcagcatagtgctcctcattaggcatgtaatagtaaggatagtcttcatccaaactttcattaatcaaatgggcacgctgagcatgtaaaacgacctttcttggtgaatcggcaatgattcgcaataatcgttcaacattagtaggataagtattaaaagtgatttggcgttcaggattagccttttgcaggcgcacgatttcttcagttagttctacttcattcttagggccagtaaactcttcactgttttcatcatgcttttcttctggccaagaaacaccagtaccttcaatgattagcatatcgctatttttagctgcctgcataaagtcccgcacccaatctggatgatagccatgcaagcgaatgtcgccagtataggcgatttgcttatccggtgtcttaactaatagaccagtagcaccgtaagcgtcatgatcactaggatatatttccaggataatatcgcccaccttaattggtttcttgtattctgccgcgatgattggacgagtataagtccgatcatgacctgcagcaggaagcaagaagtcgcccttttcattcaaggctggcaataaatgagctgtaattggacctgcataaagtggaatttctggggccaaaaagttcattgccttactgtgatccaaatgtagatgcgaaatataggccgccgcatgctcccagcggtcagtatcaattggcttacccgttaatttaggatcgtaaaaattaggcacatccccgattaatttatttttaatcagagtttgataactttcatctggcaattttaactctggccgataaacttcccccaagtcaaacaatacatgcgatttgttataggccacttcaatcatcggtccaccaattgtggttaaaccattataaaaagttactgtcgttttatcctttaaggtcattgcgcactactcctcgaataatttgctttctaaagatgaagtacaaaatcaagattggcaaaacagtcaatgtggcagcagcaagttgaagttgagtttcactacctgcatcagatgcaaatgaagttaaaccattgttcaacaatctcatgctgtcttcgttagttaccaataatggccagaggaatgaattccaaccagaaatgaaacttaataaagcaacggtgaacaagccacctttagacattggcaccaaaattttccaaatatattcccaatcactcgctccgtcaatcatcgcagctttataaattgtctgtgagattgaaccgaagtagctttgcaagtagtacatgtagaaaattgaagttaaaaatggcaataccaaaccaatataagtgttcaacaagcccattctggcaatggtattgtagttagtaaagataattgcttcaccaggcaccatcaataatgataaaagtaccatttgaacaacacctttacccttgaacttcaagttaaccatggcaaaagcaccaagcaaggcgttaaacaaactcacaattgtcgttacactagctgtgataaaagtgtttaggaagtaacgagtaaatggagcttgggcgaatactttggcataatttgaccattcaaaatgcttaggaatgattgttggtggaatagtggttgtttctctaaaactcattaatccacccaaaatcatgtagataaatggaaagacagtaatgattgcgaaaatcgctaaaataatataagcaatcaaagtgccccaacgaatcttcttcatcctttactgtcctccaatcttcttcatcatcttgcgttgcaagaatgtgacaaacataatgatgataaataagacaaccgttgcggccatcgctacacctggagtaccaacaatttggaacttgttatagatgtagaacactgcagttgtggctgagttaccaacacctgcttgtccattgaataaggcataaacagatgtataaatcttaaatgcagcaatgatattcattgttaataagaaggcgatcgttggcacaagctgcggcattgtaatacgccagaacttttcagtaccagttgcgccatacatatccgcaattgtgtagtaattagggtcaatgtttctcaaagcccccatcaagataacgatgttaaaagctaaagaagtccaaacaccaaagatgataattgtcgtcaatgacatcgctggatcatcaatccagttcggtgttggtaagtgaaccgccttgagcaagaagttaagcaaaccatagtcaccgttaaaaatataacggaatacgataccaatagcgatagttgacgtaacatatggcataaagaaagtcgtttcaaagaatgacttatgctttatcctgctgaaaataaaccaggccaacatgattgaaatagccaaagcaactggcacagaaattagggcatacaaaatagtattcttgattgcccgccaaaattctggatcactaaagatatattgataattgctgaagccactccaatttagattaattaacgagccgctttgaaaactcattacaaaggcccgcaaaattggataaatactaaagaaagtaacaaagataattgttggcgctaaaaagagccacgcctttttctgattgctcttcattagtagacacgctctccttccttagtaaacaggaatactcgatcaagacgcatcttcaaattgatattatcaccaggcttaattggtgtctcaaggttgactaatgaacgagcttgtaccccatcatgggtaaacttcaaaattcgttcacgaccgattaattcgacatcatcaaccttagctgaaactgcaccatcttcttcgactggcaaaatattttctggacgaacggataaaacgtactcgccgtcagttaagtcacgtttaaaacgatccttgtctaaatcgtccacgttaatttcaaaatctgagccagtaatcttgccgccattaacctttacattaaagttatcaatcacaggattaccaacaaaattagcaacaaagtagttatttggttcaagatagaagttttgtcctaagtcatcttgttggatcacgccattattaaagagaataatcttatcaccgattgacaaggcttcttcttgatcgtgagtaacaaacaaggtggtaatacccacacttttaactaaagcacgaatttcttcacgaatcttcaaccgtaaacgtgcatccaagttactcaatggttcatccatcagcagaatcttaggttgttgcactaaagcacgagcaatagctacacgctgctgttgaccaccagataaattgcccggcttttgatcagcaagttcggtaatctgggtcgttgccatatatttttcagcaatcttcctcgcctcatccttaggcatcttttgcttgcccacagtcagaggaaacattacattctgaagtacagtcatatgtggatataaggcatagttctggaaaacatagccgatctgacgatccttaggtgctacgttaacaactgacttgccatcaaaaaggatgtcaccgctagttggattaagcaaaccagctagcatatttaagatggttgttttaccacaaccagatgggccaagcaaacatacaaggtcacctttttttacggaaaagctaacatccttgattgcttcatgaccgttatcataaacctttttaaggttctttacttccacgaatttctcatcattcataagtttcacgcaccactatatattgatttaaatttttaaatttttctattaattctaagctaaatatacgaaaataacaaataattttcatttgaaattcggggtttcaacgactttgtgaaatgcttctcagcaagtattcggcttttgttcgcatttgcttttatttttcacttatttctttttaaaaattcgggtttactaaatattgtggtaggtaccaaaaaagccatgaattagtcatggctttttgtatcataagttatctccacgttcaaattgatattttgaactattcaaggcttgacgaaccaacttgctcatcaagttcttagtctttttggtaatcacaccagcagtttcatcattagcgctagttaaatatttaataagctctctgccttccatatttttagctttttcatcaataagatcaattcggccaataccgtagctttgacaatcatcacgataggcgtttacctcataaatatattggtgatagcgtggttcaacaagcacttgtaaagttttatacaaccagtaagcactactatctgaattaaccatatgatctgccaccttatagttaagtggtgtatcctcaatattggtgtagaaaggaacatatggtgaatatgcataaaagcccatattaatccattgaattgcagccatcttggcaggaacatcatttctaatttgcaagatgcttgattcttggtttctgtctaaagcaatagaacggaacatcttttgttctttttctgaaccagatgaaaaagtgtccattggatcgtatggtgtaccgttatagtgactagttaaaaatctttgcacatcttcaacaccaatcttcttttcgggaacgcgcgtaaatggcatttcttgactagttgggtcttgttcaatgcttggattaaacaacttctgtccataccaagttcttggagtattgtaaaaagcatcagcttcatccttagtaccaaaaatatctctgaaagaaaagctaccgtcagtactattgtttaaatgattcttttctacgaattctcgaataccagctgaatacataaagttatctggatcatcaaagtcaacattttgaatcaccatgatgttaggacaaattgcgtaagaatcatcaggaacacgagccgcaacccattggtgacccgcgccagtttccagataccaaacttccttgttgtctgaaaaggcaataccgttgctttcaccggtaccatatttttcgattaattgccctaagcgcttaacaccttcacgagcagtcttcacgaatggcaaagtaatataaaccattgagtcttcgttgattccatttgctactaaaggatcatgtcctaagcagcgagcattagtagcttcagtttcagtggctgacatagcaacgttatattcgttaatgccttgctcgtcccagcgaccttctgaatcatcagcagtagggacagcagtccatttgcagccatcgccctcaaggtgcatcttaaagccgttatattttgatacataatcttcatcataatgacgggctgggtttaccacaaaaactttttcgttaatgccaccataaccgtcttcgtcacgcgcaatcatggttgatccatcgattgaagcgtccttaccaactagcattgcagtacagttatcttttttcattattgtttgtacttccttttttatttcagtaataatttttcatattattaattctactactcattaacctgcatttgccgatcaacttttgctcgaccgttattatagttaaaaacataaccgggctgcacgttatagagatagacattgaagtttaaactgccatcagttgaaacggcctgcaaattcacgccgcgggccattaactcattaccacgaaaaacagcagttgcttgataaattacacgcttattctgccgcagtgctctcctaaccttagcctcaaaaatagtctgaatcttttggttagaataagcagattgcgtaaacaaattcttaggattattttggtcccctgattgattgcgtggatcataattgccgctttgatcaattccagctgagactgaataggcaatcaagtggccccgattatagatttgggtaccgttacggtgattatagtgccagccagtcggttcaacatattgccttactcgcaagctatcattagccacattgcgcttttccaaaaaggctgtattagagcgcgatgttcgattcaatgaatcaaggttagagtaaatcacccgatttatcttccatgcgcctttgaccaaagtcgacttatcatggttgacttcggtataagcgcgactgccactcttaaaattcaaattagctaatttttgataatcagttggcgatagacctccataattggtcttggcttttgatgcatcgctaattgtattagttacatgttcatcattattgccagtaaagtcacgcaaaaactggctaccatttggatcgctgccagctttagtaaaaactccccataaaatcgcgattaagacaattaatgatgaaacaaccgttccttgtttttttcgtcttcttcgtgtcatctttttcctctaactacgagcccaatcatcaagcatgcttaagaaaaaggtctccgaaaaacgcttaatcttagcaccatttttgatcaaatcacgtgctgcattcaaatcctgattatcttttctaaagaaatcttgatcacccatgattaagtaattagtcgttgctaacactgaattgtcaacttggccgcccatattgttgatcatcttgcccgcttcagcttcgttcatatgaatattgccagacaaaacgatattcttattttgaaccggattgtgccaacctaagtcaacataatccaattcgccaatagttaggtcgatattcttaatcttgctttgtgccttttccaataaatcatcagtaaagtgctgggcaaagtcatcataaaccttgatcgtatcaagagaatcctgcaaaccgtggtgagcctcaacttgagcaattccagcccgctgcatgcagtcaagcagacggttatggcgctcgcgtggataatatgtccgcgccaaacgcaatacgtcaacgtaatcattatcaagcactggtaagccatatttttgacttaaatcatacaaaaagttcaagtcaaaattgacgttatacccaatgataacgtcatcaccaataaactcacgaaattcacgaatagcctgctcagccggaataccttccttcccaatttgctcttcagtaattccatttagcttagtaataaaagcaggaacagaattattcttggaaaacttcaccaaattagtatattgatcaacaatttgaccgttacgtaccttaaccccacctaattcagtaattcgatcgcggtaaggatataagcccgttgtttcaatatcaagcattgtataattggtcaaaaagtcaggcttttcctgtccttttttacgcaacttgtcttgcgcaccggtcacatgtaaaattccattttttatgtaaatactcattcttcacctatttaattatttaatcaaattcatcagcatctcgtgcgaattgctatcaaaacccattgctcgtttcttaagatcagctggcaaatctgcatcagctaaatcagcggcaatataatgccaattaggaaattgctgcactagctttaccattggatcaagtaattgaggactggtctcatctacgcctaattccaaaattacgacattcttgtcctcggctcccgttagaaaccaacgaaaacgcgtattagcatcggtatcagggaagaagttagcattcagcggcatatgcaattccattggactattgcagtcctcgcactttggtactaaatctgccgttacgttgccgttcttaattgccgtcataaagcgttctactacttcatggttatccttttgaccatgattaatcccgctagaacactgcattttagtccaatcaccaaaggcattgaaaattcgattttcattaaagcctgcattttcaaaaaagtgcccgaatgtactggtcgcaataaaatattttttatcacgaattagcttttttagagcaagcatcgtctcactaggctcatattgtaaggaatattcgttgattagctcactccaaaaagcccattgctcgctccaagtatcaaatctcttatctaatgcatccccaattgtatgcacatcatacttatctgcaattttgccaaattgatcatcaaagccttcttcacttaggatatctagtccctcttctttggccatgccattaccagccgttacgatcaccgtgttagcatttttcagccatttttttgctgtcactaaatctgccattttatctctttccctttgaataacctgtcaagcgtaattgtccattaatgtattctcctaagaaaacatcactgatactattataacctgcctcttcaacttgttgctgtaaccaagcttcgcttttgtgaatcaactctaagacatcaatattagcctgaccatcactaattattgggaaacgaatgttagcttcatcattttcaataatagttaattgcccgttttgctcaaagatacaattcttaatcttttcaacagagtagatacctcgactgcgcaatttaaacattaattcattagcggagattcctgctttcatacagttgccaactaacaccttgccatttttaattacttgaacaggtttaccatcgataatccctctaatccaattattgtgatcacggctgaatttcaaaataaaaacaaccaacgtccaaacaattagaactaggaaaaactgaagaattgtaatactaggattgtaaatcaagccaccaataattccacctaaaacataattctgcaactgatctaatgcagtcgtaggagccagattagacttaccaaagacattgatttgaatgattaaagttaagataccgagagcaaacttaatgaataattgtgtgtaatctagctgcattattttattacctctactttatgatcaattacatgggcttgcgttaatgtgtaagtattgcgatcatcattaaggtttaactgataatcaatatttttagaatcaatccttacgatcatgccattagttaaaaccgttgaactaactaaaacatcagaagtcgaaacattttcatctttagcaatcgatttgatgaatggcacgatttgaatcgcctgtgatttttgcgtattaagttgcacatatttttcatattgcgtaccggcaaacaaaagcaaaaataataaggcaataatacccaaatcgcgatacttggttgcaaaacggttatgtaaatatagcaaagcaaaaattatcattgctaacgccgagactgtcaagaagtttgtgtaaataatctctctcgttgattgacttttttatttatcttttaatcaaaataggattctagggtgtctcgaacttgcccaaatcctttatgaatcctgttaaagtaacggtcattgtaatccattgcctgaactccaataaaggtgtcaagcgactgctcagttggaaattctgttttaggcttggttttccgcttaagcctgttgttaaaggattcaatcatgttagttgagtaaattgaagctctaatagctggcggatagttgtaaaaggttaacagatcaggctcaacctgtctaagatctctaactacgtttttgtaggctttttcccagttttgatagaattcatgcagcacctgtacagccatttctttgtttgactgagtatgaatctgcttgaattcatccagtgctttttttcgatcgtcaacccgcattttggcactgatattacgcatgacgtgtaccaagcagcgttgaaaatgcgctttaggataggactggcagatagcctctttcatgccaactactccgtcagacaagaagagctctacctgttcaaggccgcgactcttgaagcctttgagcatttcgctccaaatctcaatattttcagtaggcgcaatacagtagtcaatcacttctttatgaccattaggtttgataccgatggcgatataaactgcttcgcgctcataagtgacccgcttaagaggaatataggtggcatcgagataaacgcagaagaacttatctgacagatgtcgctgatgatatgcctcaactttgggaatcatttctttagaaatattggaaaccatagctggagaataatagccgccatacattttctcaatcaaatcagcgatttctcgggttgtgacgcccttggaatagagcttgataacagtttgctctaaaacatcagtatgccttttataatctggcatagtgtgttgatgaaactcaacgtttctgtctctaggaactttgatttctatttgtccgaattgcgtatcaaccttgcggtaataagcaccatttctagagttgccagtattccagccatttctggcatagggatcatagcccagaaaggcagtcaattcagcttctagcaagttattaacagcctgttgtagttctttgcgcaataaatcatttattttgtctggattgaatagagcttgagcaaaatctttggtaaaatcattcatgaaggagttcttctttctgtatgtgtttttttgttcaaaccaatcatacgagaaaggaactcctttttctaatgtttaaagaaataaatttaaggaatcattcatccttacacaaactattttacagtctcctaacgccgccaccaacatcaaagcatataatactgcctgattagtattctggttattttgaatatatttcattgtataaaaggtcatgctctacctcacccttcatatttttctttcattctaacacagaaaaaaagtagcactttcgtactacttttactagaaattattcacttttcactattattaattatttttgaatttcttttaatccagctttgcgacggcccatgttaaaccatggtgaaacagtgaaggctaacacatcattaattacatagatcaatgaattaattgccatggctaagtttgcatcaccttgagcataagttacgcccaaaagaatcaactggaagacgccactagcagtccaccaaaagtattgattgttgtaacgcataaagcacatgatcccagcagttaatgaaatagcaaaactaatagcatcaatccaaggacgaggatcattggtaaatttaccaatcaaaaagccggatacaacataaacaagtaaagtaccaacaatagcaacaagccattcctttgaaccgaattttcttaagtgattcttagtgtcatcattccatgatctaacagcaataataactggtaaatctaaagttgcaatataagcaatctgttcaaaaatggaaagataattcttagctgaccaacctgcatagataaaacaagcagctgaaatcaaccccaaccaaccattaattgctttagtagcgttaattgccaatacacaaagtgtacccaaaagcgtaccaataaaagtaatcaaagttacgcttgtaattttgccttgaatcagcaaagctaattgaaatccaaacgcaaaaaaccataaacagtaattttgaactggccagcctttcaattgattaaatagccaaacaaaataattttcgtgttttctttccattgtactgagacgtaaaaagtagacaattaaaatattggattaatagaggcttgacttcgatactctttcggggttaagccttttaatctgctctttatcctttcgttgttatagtattcgatatattcctcgattgcttgagttaattcttgaagattatgatacttgtattcttgatcatagaacatttcagttttgagcaggccaaagaagttctccattagcccatcatccatggagttgccctttctggacatgctttgagtaataccatggagttttaaagctcgctgataacgagggctttgatactgacagccctgatcagtatgaaaaatgcagttattaagagctgtttctttggcaaaagccttgtcaagcattgtcattactaaatccatatctggatgtttggagatagtataagaaactatatcgccaccgcagccgtctagaataggcgataagtaaagcttttcattattaagatgaaattcagtgatatcagtataccattttgtgttaggcagggctgcgaagaaatcacgatgaattaaatttggagctattttgccaatagtacctttatagcttgaatatttgcgcttattgcgcctgatgcctttaagacctaatttatgcatccaatagcgaacggttttctccgtaactttccagccctctctgattaactgcaaagctactctgcgatatccatagcggccttgatgatgattaaaaatctcatggattctagcaataagctttgaccgtttaggcttggcgggctgtcgtttgataatcttgtagtatgagcttctggcaattataggtagctcagggtgctctgcaatcgcagctaatacataatttaaactaactttgaattcttgccttagatccgtaatcaccctagctatttcttctgatcttcttggtccaaggcacttagtttttttacgtattcgttcacaatacgcaatcgcaagttttcttctttcagctgctggatctctttctccagttccttgcgagatttctgcttttctttggtcacgggcagggcgtcctttctgtttgataatgacattatacccgtttttcttatattctctaatccaattgttaagcatgccaatacttttaaaccccagttccaaagacagctgtaagtatggtttattgccaaagattgcttgttcaatagttcgctgcttaaactctttggaatagctttggtttttagtagttaaaatttctattccatgcatatcaattaatctaagcatatagtctaaattagctagattcattctgtacgctttagccaattgactgattgagatattttcatctttccatttatgataaatttctattttttgttctttattaaatttagacatagtaaacattctaagctaaatagtgaattagttatccgacgggataattgattcactatttttattcttttgtagaattaaagtagtggtaaaacgatatgccctgaggtctttagacacttgatgtcgcataataaactggcagttttacttaagttttcaatagtctcttcgaagaatgtggacactagatgtcgagtttagaaaattagatctgatttcttaagtaaatacgttttactactaagttttggaggtttttattatgcaagttacttttggaattgatgtaagcaagtctacttctactgtttgtgaactaattggtgaaagcaaaaatgaactaaccattactaataatcgtcctggttttattcaattgcttcatgaattaaccgctttttctaaacatccgcaaattatttttgaagctaccggtgtttattcacgcagactgcaggcttttcttgaagactacggctatgaatatgttgttattaatccgcttaaagccaaaaaagagatgaatatggggctacgctacaacaagaccgataaaactgatgcttatcatttagctttaattcaaagactttatcgccatccggttaatcaaagcgaatcccaaacttataagcagcttaatgctttgagccgcttctatgaccagctgacaagtgacttggtaatagctaaaaatcgacttcaccaagctctacaatcgacttttcctgaaattgaaaatttattttcttctgctaaaggtaaaaattactggcaaatagttgtgcgatatcctcattgtgacttagtaagaagagaagataaaaaacagcttattaactggttaatgagcttaaaggggattgcttttaaacacgctctaaggactgcagataaattaattgaattagcttatcaagcttatccagttgtatcttgctctagcatagaagtcgagcaagtgcagtattatgcacacagattgcttaatttaagtgatcaaagagaaaatttaatcgcaagaatggttaagttagcgaagtctttgcctaatcatgatttagaaaacctagaaagcattccaggctttgcacagaccactgctgtcagagttttagcagagttaggagatttacgcagatttagtaatcctaataaaatcaatgcttttatcggaattgatccaggcagatatcagtcaggagaaatggactctaatttaagtattactaaacatggcaatgcagtcgcacgtaagttgctttatcgagctattggacaaattgataatgcagctaagacaaatccgtgtcatatagcagattattatgaaagcaaaaagctatcctctcaaaccaaagggttcaaaaagatagctattgcttcaattcataaactaatcagaaccatttatgccctgattatcaatgatcaaccatatgattacaacgtagccacacataatcaaaaagactttagtcgtaattaattgatcaagtacattataacgctaagcccaaaaatcagatatggatctgggcttatttgtcgtgtctaactaaaaaaataaatcgacactaaaagatgtttaagttgaaatttaaacaaaaaatgaagccaaacttcttattatgcttgactttacgtagaaaaagacctaaaagtgtctaacttttaggtctcagttcacatcctattcaacattccccttttttattttaggttgcaaaatacaagatcttgtgccttatccgtgctatgtaaaaaaacatcgatatctagtatagtggaccattaattaaatacaagaattgacatttttaatttttgcgttaataacatatttctatttccgtttatcaagcaaacatttattaattttttctaaacagcaaaaaaattttgttccttttagtgacacagtgtcatatgatatatacgtgattattaatttatatttttatggaggtacactcatgtttaaaactaagaaaacgcaatttgctatccgaaaattagcacaaggcgcctcagcagttttactttgcttcggcatattgggcggagcaagtgcacctatcgttccagctgcaactacagatgacccaacaaaaacagtcactgaaagtacaattaatagtgagaatacttctttcaatattgaaaccaccaccaatgcatctgataaattcgcttccatcagcaaaaatgggggggtacaacggtagtgccaaattctgctgagccagtttctccggatcagtccattacagaaaatgataatcagcaagaaaaaactactgtagagaattctactgagatatctgagcctgtcaaagacatcaataagtttgataatgatgccaatgttgataaagacgaaacaatcactgtaaaaaagccaacaattaatgtcgacactgaaaaggtagaacaaggcgatgaaacagagaaaagtaaactcgaagaaattaaaaagtatattgaggacgtagccgcaaaacatccattaggcattgccggaattttccacctttttggtaacgaaatagatggatctgctcatattgcaggaaatgtcgcaacagacaaattaagtgctggcaacttcggtactatccaagatgccactagtaacttgactacttgtgatattcattacatcggcagtattgatcatttgaatcagattgatggcgaaaataaactagttatttttggtccagatgttgaatataaatcatacgaaaatggtagttccattcaggtaaaaataaatggaaattggcaaaaagtaggaattccatacaacaaaactatcagagctgaccaaattctagatattcaaggcgaactagataaattaagcgataaatcagacgaatgggctaagcaaacgcaaaccgaaggcgtaattgctgatttcaaggagggtaaatagttggatcgacgtttctaatgctatcaaggatggcagcaaagatcctatttatgtaactattgatgcaaaatacctttcaggcaataacaagcatgaaattgctattaaaggcatccctgcagacgcagaaacaccaatcatcatcctaaatgtaactaatgttcaaaatggcgatttaaccgttagcacaagacttgttttggattattcagaccaaactagcatcaatggcgtaagtgaaaaaccatctcaacttaataagttattatggaattttggaacagatgttaaaaatttaactattgaaggagacttccatttaggtagtattttagctactaacgcacatattaccgctaacaaaaatgttgacggtaatatcattggtaacaaaatcactattaaaggtgaaactcaccgttgggacctaactccgccattagtagaagttgaaactccgccggaggatccaaaagatccacctaaagaccccgaaaagccagagaatccacctaaggatcctgaacctactcctgagcctgaaccggaactaaagcctgagcctactcctgatcctgaagaagagagtactcccccattaccagaagaagtaattcctccaactgataatgaaaattcctctgacttcaaggaagaggacactgctcctctaccagaatctgttgtagaaaaacaagttaaaaagaatcatccatccccttcaactactgaagaaaatattgcacctcatgctgcgactatcccaacctcaactataactgaaaaagaaacagttttacctcaaaccggtgaaagccaagacaagctaatgacgattggactcatcactactagcgttgcttcattgtttgcagtattaggcacagtaatcaaaaaaagaaattaattaaaaatgattcaattcaagccatttttattcttaaaataatctagaattaagtgaggattaaaccatgttaaaaaatagactaaaaatattccaacaaattcttcctactaaggcaactaacactccaaaataccaattgcctatcaactattacgatcctgaaggcagcatggttggcacttattctggaattaacttggcggcaaatgaaactatcactcaccaccagctcaaaagatttatcaacatccatcttcccgaaaactacgaagtttttccttactttgcttatcctaaggagaatatcacctgtgaaaatctgcctgatgaaataatgatcacaatcagattatctaattaaaaaaggcgactcgattgagtcgcttttttcattgcaattgatattaatgttgcgaagcaccagttgtagtatctggttcttcgtgcttttcttctttaacttctgcagccttagttgaagcaccagttgcggcgtctggatcagaatttctacggtaagttgcaccagtagttgcatcatcatctactaccaatttttgaccagtagtctcacagaagtacttaactaatggatataagtctttgacccattcataaataccagcatagttaccttggtcgtcttctacacgcttataatagtccacaaccaacttcttcaaattgcctgttggtattggcatataaacatcatcatgacctgcttccttagtccgcaaagcatgaacaacttttttaacattcggaataacgtcacgaacatctgggtgaactgcgcgcatcgtatcacccacttgatctggcgtagctagcattttcttgttaggatcagttggacggttataccacaagaattggttattatcatcaacaaatgtcattttaccaatggtatttctcagcatccaattaagttggttaacagttaacagacctgcatcaagtttgacataatcgtcaccctccgcagcatgaacttttttagctgctttatctagccaatcaggatcatttttatcgattccctcaactgtatacttagacttaccctttgcatcgaaatcttcttttaagtattcatcggcattcatatctttaagccattttggttcagccatagtaagaccccctcgtatgaactttgttaatctaattatataatgtaagtggtttcaattcaacaattttaatatatttatataatatttttactagctggattatatattattttacgcgtggtgctagttaaatctttctagacaataagccaaattataagctaaaattgcaatttccaaccggctttgaaagcctatcagactacgtgctcgattgttctcggcattgtaataggtcagaagcgaaaagtcgctttcaattgttctgcgaatagccatcaattgatgatcattgtgctttttagctcctgtcatatttttacgatatggtgtccaaagttcataacccatttgttttagctgttgatgcagttctttgcctaaatagccttcgtcgccaagaagatagtaattagatggatgggtattttccatcagttcaactgtctccctggcatcatgaactgatgcttttgttacgacataatcaagaatgtaaccgtcatcgctaacaatgacatgaactttgaaaccatagaagtaaattttcttggtggccttataaccaatgttggcataaccgcgaaaaattttagcacgatagttgcgaattggttggcaaacaggtaccggaaagctgtcaatgatcaagaactgtccattcaggtcaacctttttattcatttcttgccgtatctgataaatcaattgcaatagctgacgtgaacgccgattaaaacgtgagtgtgataaacaattgaaacattcacagaatcttctttgtgattcaattcctgtcttagcttgccagataagtaaagccaaaatcagactgtccgtagttttaatttgatcaatatttcgccgatgagtaaactcagccggtgcatacaaacgataccagtgccgacaaattatcactaaatctttaaaactaacttgtaaatggtggctaaaacgcttaagcttaaggcagttcaatcagatcagactcttttctattattactatttacaagtcgagtctaacaagattggacttttttattaactaaaacgatttaactagcaccctgcgtattattttatataaaaaaagctgatcaacgagcaactctttacatctttgtctcaattgtatgagtgtccaaatgaatgatcacgtcaaacatcgctttttcttctggtgaaatcttatgagccacctcaataacagcaatacgtggattcttcaacagcgtcttatgaatgcctaacgacaagttcgggtcaagcgcacttgtcgcttcatcagccagcaaaatcggccgatctgataaaagcgcgcgagcaatttctactctttgaatttgtccacccgacaagccactgccgttttcacctacagccttgtctagaccctgttcctttaccaattcatctagaccagcctcatgaataacttctttcaaatgctcgtcactcactttacgtcctaacgtaatgttgaaacgcaacgtatcatcaaacatgaatggcttttggttaacataggaaaaataattatgggcagcatcccaatttcccgttacatccgtaccattgatcaaaattttaccgtctttgggctttctcaaacctaatagcaagcgaagcaaggtggtcttgccccaaccacttggcgccatcaatagaactttttcacccggcttaactgttaagttcacattctcaaagatgcgtttgtgatcactacctgtaacataagataattgttcaacctccataccatcaaaatgatcgatcttctgcttatcatctttcagcacgtgatgcaaagcgcgctgggtcttttcccacattggcacagtcgacttgacttggttaaattcgttaaaaagagtcacgattggcgtgataaagttcaaggccaaatcgaccatcattactaatgtacccacctttaaatttccctgcagcatcataataccgccaatagtacatggtacgatgaagcaaaacaattcagcagctgaataaattaattctagtgcccaagcttgagtcaacgtcatattacgcagagcgttctccattgcctgggccgcaccagctgctcgtgtaacgatgttggtgcgcacgttataaagcttggtagcctgtgccccatttaatgaatcggacacattttgcgtatagttagcgttagtcgttgcccaaatcttggacttacgtgtaatgataggactagtaatcatttgaactaatgctggcgcaagcgtagcaatcaaaaatactagggtcatctgccatgaactataaaaagcaaaagtaattgccccgaaaaacgacaaaccttggaaaatcatatccaattgtgccgttatccgattagtttcaatctgttttaaatcgttggtcatcagtgataaaccgctcttgatatcaggctcaccttgatcaaccaaataacgcaagttagtgcgcttaaaggtcatattcacgtcacgaataatgcccatctttaccgtttcatagacaaagttactggccataaaacacatctgacctaaggcagtcaaagcagccaggcgaatcaaatgcagataatcatgcgatcctgacgaagcaacattcaacataatttgtaccatataagctacaaagacgatgttgcaggccttgattgcggccaaaatggtatagctaataatttggctttttttagcgtacttcaggctcattaatttctccttttctatcccgttagaaacattatacccgctagcttgtctttttctcaattagatacgataattagagtaatcattttaatttttaatgaaaagcagaaaggaacttttaatgaagactggtactaaaattattactttagacaacggttatcacttatggaccaacacccaaggtgaaggcgacattcatcttctagctttgcatggtggtcctggcggcaatcacgaatattgggaagacactgcagaacaattgaaaaagcaaggcttgaacgtgcaagttactatgtacgatcaactcggttcactttattcagatcagcctgactactctgatcctgaaattgccaagaaatatttaacctacgaatatttcttagatgaggttgacgaagtccgtgaaaagttaggacttgataacatttatttaatcggccaaagctggggtggcctattagttcaagaatacgccgttaaatatggtcaacacttgaaaggtgcaattatctcctcaatggttgatgaaatcgatgagtacgttgcttcagttaacagaagacgccaagaggttttaccacaaaccgaaatcgacttcatgcacgaatgcgaaaagaacaacgactatgataatcaacgctatcaagatgacgtacaaattttaaacattaatttcgttgaccgaaagcaaccatctaagctttaccacttaaaagacattggtggaaccgctgtttacaatgctttccaaggcgacaatgaattcgtaattactggtaaattaaaagactggcatttcagagatcaattacacaagatcaaggtgccaaccctattaacctttggtgaaaacgaaactatgccaatttcaactgctaagattatgcaaaagaagatccctaactcacgcttagtaactacacctgacggtggtcaccaccacatggttgacaaccctgacgtatattataagcacttagctgactttattcgtgaagtagaaaatggtacatttaagggcgaaaattaattaacagatattcaggctggaatcgatttccggccttttatttttaaggaaaatgatatggatgaaaaagatgtcaaaattctgctagttgaggatgaagaaagcgtcgctagcttcgtcaaaactgaattagaatttgaggattaccaagttgtttgggctgaagacggcaaaaaagcattagacctttttactcaagaaaagccaactttaattttgcttgattggatgttgccagtatatgatggcatgaccgtgttacggcgaatccgcaagcaaagtgatgtccctattattatgcttaccgccaaaaattctgcctctgatataagctctgctcttgatcagggactagacgactacctcaccaaaccatttgaaatcgaggaattgctggcacgaattcgggtagtcttgcgaagactggaaaaaatgcggcagcaaaatgacgtccctgatacttccctagaatttggcccattaaaaattgatctgcttaagcacgaattttactgtgacaccgagcaaatttatcttactcctaaggaatttgccttaatcactgaactaatgcgggaccccgaaaaagtcaaaagtcgtgacgagttgcttgatacagtctggggatatgactttgttggtcaaaccaatactgttgatgtttatattcgaactattcgcaacaagataggcaatccctacaaaaagatcattaaaaccatgcgcggcttgggctattgtttgagaaaattagatgataatcatgaaaaaagctgatcctcaaacaactacgcaacaattaacccgtttattcgttaggctatttgtcgctattttaattctggtcaatttggcttttctaattatttcatcggcctatatttattaccaagctgaacggcaaagtgaacaagttgttgaagcagtaaaagaaaatcttgattcaaaatatgactggtcggctatgctggatgcttatttggcaaaacaagacgatgatgccatcattttaaccacccctcaaggcaaaagttattactctgaaaatgctcacgagacctttaaacaaattaatcgccaaaatcattatcaaaacatggtctattccaataagcatatttacttcttacggacggaaaactcgcatgactttaaaatcaaggttgcattaaacattgatcgcttatttcatttaattatttggctatttgggacaatgattgtcatcaacttaatcgctattctgctgagcatcccccttattcgccgttttgcccacaaatggagtcgtccaattcaggtaatgaataatgaaattcaagaaatccagcaaggtgcttcaactgagcaaatcacagtgccgcaacaaccattagagattcgaaaattagcccagtcttttaacaatctgctagcttttcaaaaacaggccttacagcgtgagcaacaattcgtcagtgatgcttcacatgaactcaaaacaccaatcgccgcaattcgaggacacgttaatttaatcagacgccatggtcaagccaaaccagaaatcatccctaagtcactggattatatcgatactgaatcaaaaaagatggaaatattagtcaacgatttactcaccttaggaagaatcgaacgcaatactgaagtcgtcaaaattgatttggtaagaattattaatgaagtagtgtcagaaatacagtcagtttatccacaaaaaatacagactgacatgccacaagtattgaaatatcgtattaattcactagattttcacaacattgtgcacaacttagtggaaaatgcggcaaaatattctcctcaagacagcactattgtagttaaattagctaaaaataaaggacaggtctctttcacagttgcagacaacggaatgggcattgcgccagaaaatcgcgagaagatctttcaacgttttttccgtgaagacacgtcccactccaataaagttaaaggatctggcctagggttagcaattgtcaaagctgaagctgataagtatcatggtcaaattaaagttacggataatagtcctcagggaacaatttttacagtttcttttcctacagaaaaatgaagaaatcttcatttaaactctattaaatcttagttttttaaagctgcttagctagtaagataaatatatcaagttaaagcaaaacaaaaaattatcaatagtttaaaggagaacatattatgaagactattaacttaaagaaaattactattactggcgtagcattactcggcttaggaactgctgcaattaccgcaactaatttagctactgaacctaacgtagttcaagctgcttcaagcaaaattaaggtttcacaaaattcagctgttaaaaagtttaaggcaaaattcaaggcagctaaagtcgaatcaatcagcttagataaagaaaaaggccgttacgtttacgagatcgaaggcttcaattcaacgagagaatacgaaatgaaaattaatgccgcaactggcaaagttatctcatcccactccgaaagacttgatcgagacgagcgtaataaaaaagcattaaatctcagcaaaactatttctcgctcaactgctactaaaattgctcaaaaaagagtatctggcaaggcagttgaatggtcattagatcgtgaaggttcaaagaatgtttgggaagttaccatcagcaagaacggccaaaagagcgaagtaaaaattaacgcaattactaaaaaagtaatcagtgttgaacgggactaattgagaaaagaaggtatagaatagatgaaatttactaaactgacaagtattgcattattaagcgcagctttattaacaggaactgtagcatgttcaaaacaagataattcaactgctaaaactactacccaaaagagtgttacttcatcaaaggttacacataattctgaatcagcaatgagcaaacaaactcaaaaagataatattcaaatcaaattaagccagcaagaagccattgataaattccatcaacaatttagtggcaaacagcttaaaagcattgaattaaatcgtgaaggcaaacattacctttatgaaattgaaggattcgattcaaacaatgaatattctgttaacatcaacgcagaaactggtcaaattggacatgttcattcagaaaagttagatcatgatgatcgaaaccaaaaagctctagatttcaagggcaccattagccgcgacgatgctagtcgtatcgcagaagagcacattaaaggcactagcgaagaatggaaactagagcaagacgaagacactggtaaaacatactgggaagttaaggttaaaaatggtcatcaagaaaccgaagttaaaattaacgctcacaccaaagaagttatttcaactgaacatgatgattaataagattaagaacataaagaaagccgcaacattattctcgaagttgcggctttttattttgtctaatttttggataacttttttaccaataaccaatcagtttgaggatcgctaccaacttggaaagtatgctggctcactttttcaaatccatgacgcttataaaaatattgtgccggaatgttcttttcataaacgcctaaccacatgtaatctttgccttcttctcgtgctgtcttttctgcaaaatcaaacaaaacattgcccaacccgcgatgttgaaaattagtacgcagataaattcgttccacttctagagcattatcacgtaactgctcagtctgagcatccccaacattgatttttaaataaccagcaatttttcctttaaccattaaaaagtaaaaacgactattaggattttcaatctctctaatcaacttttccgtctgataatcttcctctaaaaagcgtttcatgtcatctggtgcagtataaggatcaaaagtcgttttaaaagtttcacgtgaaactttctgtaattctttcacatccgctgttgtaattgctttaatctcgtacttcatcaatatttcctctttccaccgttcttaaccaggtgccaattttcactggcattcttttctacaatttgtaacaaagcagctaattctgttctctgtttttgatctagtcctgtcaaaactatttcatttgaataagcattttctttttctattcgagcagctaatttatctcctaattctgtcacaaacaaatgcttaatctttttattctgctggtcattttctttcctaatcagctgattttgttccagttttttaatgctacgagctgccgtcgtccgatcaacattaagcatccctgctagatggtcagaaataattcccggattttctttaatgcgggctaaatacaggtactgacctcgattcaattgcatctctttaaattcaatattagcaatcgaatcaagtgctcgcgcaatagtgccaatttgacgcaaaatatcttctttcatgtttttcacctaaaaactattatatttaattttgttgtaattgcaacaataaaatataaaaactaaaaaagggatcgctccctttagttaattcatcaatttttctttagttcatttagatcgactacctgatcagctaactgcttaacttcatctcttaagtggtgagttaccataattacggttttatctttttgcgtcaaaatcaatctttctaattgtacgctagaagctttgtctaaggcagaagtagcttcatctaacagataaattggtgtatcacgcagcaatgcacgtgcaaaagcaacacgctgtttttgcccaccggacaactgtttaccttggtcagctaaaacagtatccatgccatcaggcaacttagcaattagatcctctaatccacattctttgatcacttcagaaatttttgcttttgaaacttggcgtcccaaagttaaattccaccctagagaagcagtaaaaatatatggatcttgctgcaaatatgtaatctgatcatgcaaatccttatctgaaatctggttatattccacatcagaaatttcaattttcccctgataatctctaagtaagccagaaatcaaattcagcagagtcccccatcagaatatatttatttttcagtttaaaatttaaattcaaattctcaaagataggcttatcttgtccagaatactgataagaaactttatccaattctagattgcttagtttaaaatcagcaggcaaagctccatcaacagttttaagcggtatagtcttaaatttttctataattggtttaactgatttgaattcttgccaattaaaactaatcccacttaattcagcgaaaattgtactggcaaaaaattgtgccccactgatggtcccgactggcgttaattgatgcaaaatcaaccagcctgtttgccctaaaatgataacttgactgataaaggctagaccattggtaatcgcctgagttatcccggctgttttactataatttagcgcatgttttttaacatcatcagaagcgccattgatctttttgacgattgtttgcggtaaattggcaagaaataaggtattgaagccattcaacacatcattaattgaattaaccaaacgttcattggcatgggtatattctaatgaccttttggccaaaattttagaaaacaaattgggaaccactcccataataattgtcaaaataatcacagtgaccacaagactgacattgaagtacgccaaagtgagcataccgaaaacaatttcactgatttgtctaatgatcatcatgaaatcctcgacaccaaagttattaatggttgtaatgtcattggtcagccaagaattgtaagtagctaccgtttgttgatgaaagcctgaataactcgtctgtgatagatcttgcgcaatgtcatttctaattaatttatccacattttgtgccaaacgggtttgctcaacattgactagacagttaacaatcgcgtaaaaaatataggcaccgcccattaaggcaacccacatgaaaaaacgctcagcttttaattttgcaactgcacttaaagcattagcgctagatattccggctagtgtcaaaaagcctgcattaatgactattaaaaatgtaacaaataaaaattcccactttaatcttttaaaatattgcagtaattccattgattctccttatgagactgtaaaatagtttgtgtaaggatgaatgattccttaaatttatttctttaaacattagaaaaaggagttcctttctcgtatgattggtttgaacaaaaaaacacatacagaaagaagaactccttcatgaatgattttaccaaagattttgctcaagctctattcaatccagacaaaataaatgatttattgcgcaaagagctacaacaggctgttaataacttgttagaagctgaattgactgcctttctgggctatgatccctatgccagaaatggctggaatactggcaactctagaaatggtgcttatttccgcaaagttgatacgcaatttggcccaattgaagtgcaagtgcctcgggatcgcaacggtcaatttcatcagcacacgctgcctggctacaagcagcactcggatatcttggaaagcatgattatcaagctttactccaagggcgtgaccaccagggaaatagccgatctaattgaaaagatgtatggcagccattacagtccagctcaggtatcaaatatttccaagcagatgattccaaaggttgaggcttaccacaaacgcaagctaagcgacaagtttttctgcgtctatttggatgcgacataccttcctttgcgccgagaaacatttgagcgtgaagcagtctatattgccattggcatcaagcctaatgggcacaaggaggtcattgactactgcattgcgcctagcgagaacattgaagtctggacagagatgcttcaaaacatgaaatcccgaggcttaaagcaagttgagctttttctttctgatggtgttgttggcatgaaaacagccttggccaggacttatcctaaagctcattttcaacgctgtttggttcatgtcatgcgcaatatctgcgctaaagtacgcgtcgacgatcgtgaaaagatcatgaacgaattcaaacaggtgcatcaacagacaaacaaagaagaagccacagctgtcctgcatgacttctataccaaatggggcaaggtttacagccatgttatcagaagcttgaaagacatagaaccagatctgctggtcttttataactatcccaagcagatcagagcttcaatttattcgactaacatgattgaatcatttaacaatgtgatcaagcgcaaagctaagcctaaggcagagtttccaactgaacagtcgcttgatgcttttattggcattcaggcaatgagctacaatgaccgttatttcaatcgaattcataaaggctttggtcaggttcaggacaccttagaatcctactttgattaaataaataattaaaaaatcaatttacgagaaagatctatttacacaaaagatttgacagtttcctccttatattaaaaataattaaattaataatactatatttatgtatttgttcaatattttttaatactttacttaaattactgcaaaattaaaagggatcgctcccttttaattagtctacataagcatatttatatgaccattgcgtaccagcagtattatgaatgatgccgtgaactcgcttgttttgcaagtaagctgtggtctgttgataaatcggtgtaatagcctgattactatttacaatcttagctgccgaaatcagatcattccagcgtatgtcaggattattggcgtcttgattgccagcttttttaaccaaattatcgtactcagaatttgaccacttaccgtaattgtaagacgtacctgtcattggaatttgcataaatgtcatcgggtcgttgaagtcgccaccccaatgagagagataaatgtcaaagttgccttgatgtgctcgactggtggttgacttatcaggaatattggtaatatttatcttgattcccttcaattctttggtccattgtgactgcaaatattgggtcaattgatcactgtctgcttcatcatttgaagataaaacatcaaaagtcaaactcttttggccaatctcctgtaatcccttttgccaatatttcttggctagagctggattataatcaactgtatttttcactgcttgttctttagcaaaatctatacctgttttaggatttgcagccaaatcattggcaacaaagccttttggcagagttgagccattgcctaaaacctttttagtcacaatatcacgatcaattgataatgataaagccaagcgaatatttttattattcaaggcctttctattaactgcatttttatccttaaaattataaagcaagaaacgcactaacgaatatggatattgagtaaagtcattattgctcttcaagtttttaacttgctcacttgaaagtggagttaaatccaatttgccctgttgatacaactgataaccagtattgttagacttaactacttgatagtgaatcttgttcaacttgactaccttcttgtcccagtaatcattattcttaacaaatgaccaggtatcattagttccattccatcctttaatcttgaaaggacctgagtagacttggtactgagccttggttgcgtatctattgccatactttttcacaactttttcgttttgcggcccaaatagtggataagccatcaatactctaaagtaagcgatcgggcgatttaacttaaccactaccgtctttttatccggtgcagaaattcctaatgcattaggtgatttctttcctgcaatgattgcgtcagcattcttcacgccactaaaaagataggcatacggagaagcggtcttaggattcaagcttcttttccaagaataaacaaagtcctgcgctacaatcggatcaccattggaccacttagaatcacgtatcttaaacgtccaggtcttaccatctttagatacggtcccagttttagctaagccggctgttggcttaccatttttaccaagacgataaaaactttcgaatacattgccagtttgaccaaatccggtagacttactgatatcaatagtatctagtggagctgtggtgcttaaatttaaagtgccactttgagctgccgacttactactgctattgccattaccacatgctgcaagaagcattcctaatgaaatagtaacgactcctgctaaaactccctttagtttcgacataaattttcctttctcaaacaaaaaaatgggatgtactccaacacggaatacatcccattaagaaccacaactttttaactagttaatcagtaatagtcttaagatgaatcaccacatcagagcatgtcaaataaatgctgtttgtacaacaacattcagtgtattgacattgcatttgacgcttaaacatgtgattcatcatccttcttacttttgataagaataatcataatttattcgatcacgattgtcaacaaaaatctattgtataattatagaaaaatatttggagaaatttttatggaaattataaaatatggtccttacactcttttcacacttattagaacaatcctaacatttatcgtggctattgagcatatcggtatctgtttcttagaaatgtttggtaaacctgaacaacaagctaaggcttttgacatggatatcaattttgttaaacaagaagctgctcaagtttcactagctaaccaaggcatctacaatggtatgttaggtgtaattttgatcattgctttctttattttccctatccctattctttttaacgtatggaaattaattctaagtttaattgtcgtagtagcaatttacggcggattcactgcaactaagaaaatctttttagtacaaatgctacccgcacttttagcattaatttttcttttcatttaaaaatattgcatttttgtagcaaaaaacataagaaaattcaaagctcctagtgataagctgtcaccttgtgattatgtaatatataatatcagtaaacatatagaacataataacgaggtggaattcatgagaaaattttttatcattatcagcagcattattactgggttacttattgggataattggggcaacgatctatctaaatagtcaatcgtcaaaggtaagtaactttaccattcgaactactaatttaacagctcaaccgaaaatgatcagctattctagcaataacctgccacagattaatctctcacaggattccgccgttcagaaattcaaatcattatatacacatgcagtaggtcaactaccttagactgaagtctagggtttagtggcttgttagcttgcgctaaccagaacaccaacttgcttagatacggatttgacttaccagcagtaatcttttgactattgccgatagaggtcgtctaattaccaaagccttttaagtccgcgagttgctagcggactgcagcttttctaggctgcttcttttattttaggattctgccacttgcctaatcctttttctaagatgttcacggccgcattccaatcacgaatatgatgcatctgacagattgggcaagtccattcccgatccttaagggttaatttcttataaccgttttggcccataatactgccacattgatggcatctttgggtggtgtacttaggatcaattgttagaaattctttgccatatagatatgccttataagccagcatgttcaggaaactacgccaaccaacatcagaaatagcttgagacaaggcatgattcttaagcaggtttttgctccttaattcctcggcaactactaaatcgtggtttttgattaatgcagttgagagaacttgtaagaagtcttcacgctgtctgcgaatcttgtcgtgcagtctggcaactgataagcgctgcttttgatagttttttgctagccgcaaattgcgtccttcttttttagcccggcgctgcctgcgagataatactcgttgagcacgagccagcttctttttggctttgcggtaaaagcgtggattagcgaccattgatccatttgaatccgttaagaaattatcaaggttgagatctattccaagttgactctgcgtcttaggcaaggctttaacaaaggcaatatcgctgcctaactgcattgataagtagaattgctcgtcagcggtcttttttatcgtcactgtcccaattctagttgagatatgattaagcaagcgctctttaatcagttttctaaaaccagcaatgcggacaacgcctagcttaggcaatttaatatgcttagcatcaataaacctagctgtcccgttatcaagaaaagcttctggctgcttaggatattgacagttggtctgatatgaccagtcgctgcgttttttatggaaagttgggattccatgaccaatcttacgatagttgttccaagccttctgataattttgaatggcattggcaagagcgaggctatcaatttctttaacacgcaaaaagctataagtatcgcggatattctttggcttagccaatagttcgctattagtgactacttcttctgccaacctagtctcataattattaagaatagaaaaggcaaaaggcattgcttgatattgtctaacagctaagtagcccttagcatgataattacttcgattacgtcctacataagagttgtagacaaagcgctgcgcatcatagtttagcttaatgattttcttttgcttagaactaggataaaagcgaagcttaacgccaaaatgataggctaaactgctcatttttttcatgtgtttcacctcctcgtattatataaattgtaattagtcatattgtgataattaatcaaattagtatttgctttttgatcttcgcatgttagcctctaattgtcattggctttggtcaactggtctaggttatcacctcctgcagttttgtctgctttataagtctgccacccaggcagttcctttatgctctaactcacatgctgtattgattgcttctttttgctagtccttgagcaattgggattaggtgcagctttcaaagaagcaaccagtgaatacttatactggcgagattgaacttaagaactgtaattaggggttaacatgtgaagatcaaaatctatgatcagaaatttgaaagaaaggaggccatttccaatgaaattatttgtcggtattgatgttagttctaaagatttacaggtcgttgcacttgattcagaagatcaaaacaaacgcttaattaacgatagctttgtcaatgatctttatggtgctagtgaactgaaaaaacaaattttagatctagctcaaaataaacactatgatcaaatcattattggcatggaagctacatctatttacagttttcatcctgcttactttttccaaaatgacgaagatttacaaaagctcaatgtagagactgatgtaattaaccccaaagaaaccagcaggtttcataaagtctttgaagaaagtaaaactgatcctctcgatgcttattacattgctttgtatctaagctttggacattatcgagtaagcattgccagacaagacaactatcttgctttagagcgtttaacgcgtaccagatatgaattagttcaagaactgactcgtaccaaacagcacttcattgaagctttatattatcgggttaataaactaatcactgtcgataaagataagattaatactcctcttttcggtgctacaatgatgtctattgtaaccgatagtaaaactctggatgagatcgcggatatgcctaccgaagacttaatttcttacttacaggttaaaggcagaggacgcttttccgatccagataccttggctaaagcaattaagaaagctgttagaggttcatatcgcttaggcaaagtaatgactgattcaattgatgcagtgctttctgttcattacaacatgattcaaagctttaatgaatctattaaagatctagaaaaagcaattgatcgtatcgttgatgcattaccagaaagcaaaattctggaatcaattcccggtattggcaaaacctatacagctggtattatcgctgagatcggaagtatcgatcgctttgataaagaagaacagctggctaagtatgccggcctaacctggaatcaatatcaatcgggagatcacagcaacgaacatactccaatggccaggactggaaacagatatctaagatattacttgattgaagctgccaatctagcaagattacatgatcctgttttcaaaaaatattaccaaaagaagtatgatgaagctgtctactcgccgcataaacgtgcttgcacattaactgcaagaaaattagtacgagttatctttaaattgctcaaagatgacaaactgtacaggacaccgaggtcttaatttcaaaaattggtctaaatttaaaagtaaacaaaagtttaacattaaaaaaatcaacctttaccaaggcttagtttcatatactcaaatttatgatcaaaaagaacaaatatcatcgcctttcatttgacttattaccacatgactcatagattagatatttatattttacagggaagtcgaacatatgtctctattttttaataaaaaagctgactgctaggtcagcttggtcctatccatccccacattaaaatacggggattttcgggcgtttttcattaaatcgatcacacttagtttaagtaaagatatctatgtttatgacatagtaggctatgatgaccgtaaagactgtactattcaagttgacgcaactaataacaagattctaggtcagtctacgcaggtgcttgattatgactacgaaaaagatgcgtctttgaacctaaaaaagacaatttcacgccaagaagctaatgaaattgccctaaaagaattcagtggaggaacaccgatttcatgggaattaactgatgacaataatcaatcaatttgggaagttaaaatgatccacggtaaacacaaacataccgtaaaaattaatgctagaacaaaggctgtaatctaaaataatccccaacttatgcacaagttgaggattattttcttatcttttatctaggttgactatctgcacgtgacttgtaatcaccgttttcagtaccaataattagcttttcgccattcttgataaaatcaggaacttgcacaactaagccagtttccatagtagcaggtttaccaccaccagctacagttgcacccttaatctctggttgtgtttccttaacggtcatttcaacagttgatggcaattcaataccgataatcttgttatcatctgtaaagtccatatcaaccataatgttaggcatcaagaacttaacgtcatcacccaattgatcagctgaaacttcatattgatcataagtatcagtatccatgaaagtataagtattaccttcgccgtaaaggtattgagcctttttcttagttacttcaactaaatccactttttcagttggacgcatggtcttgtggacaactgcaccactcttaacgtcacgcaaatccatttgcataacggtattacccttacctggcttatggtggttagcctttaaaactttgatcaatttgccatcttggctaaaaatcataccttttttcaaattaattgcttgtaccattatttcttctccctttaatttaaacttacctttcgactagtttaaacacgctggaggcaaagcaaatttttttatcaacagtaaataaatcgtattcataatacctagtataccaaattagatgtgccgcaggtatatccgatcaatcaaatgtccgtcagtcttatgcaaaatcaggctagcacgttccttggttggcgcaatatattcacgcaagttgaccagattaaccatctgccaggtttcttcagccaattgaattgcatcttccagcggtccattagccattttatagtaaaaattatctggcttatttttatttaatttaagtacttttctaaagcgttgcatgtaccatttttcaatcaaatcttcttcagcgtcaatataaattgaaaaatcgaaaaagtcactagtcacaacttgtccactctcgggcaattgcaatgtattaattccttcaataatcaatacatcaggattttttacatgaccatatttcccaggtactatatcgcttaattcttgagaatatagtggataaacgatatccttctttccacttaaaacgtctcgtaaaaaatcactgagcaaagtcatattgtaactttcaggaaagcctttgcgaggcattaaattacgccgctttaattcctcattagggtaaataaaaccatccgtggtcatcaagtgtacctttaattctggataggttctactgagcaacaattgtaataaacgcgcagtggttgatttgccaaccgcaaccgaacccgaaataccgatgataaacggagctggtgaaaaacttttatgcaaaaatttgatttgtgctttttgcgcattctttttttgttggtaaactaagtgtaagtaactgatcaaactggtatagatctcatgcacgtcggttaggtcaatcacgtctcctaaagacttgatatcagctaattcttctttggtaatattgactttatctaagggagctaatttagcccattcatttctgttaaaactcgtataatttctcatatatcgtatccatattccttctaaaacactaacttattataatagaaagcgctaaaaatatgaaaaaaataatcctattcggcgattccatttttaacggatatcgtaatggtcaaaatacaaacctagtaactaatttatttcaacaggcactaattaattatgcacaggtggaaaacatttctaaaagcggtgctaccacagttgaaggcgtcgattatttggagcaaatttccccagaacatgatctagttgttgttgaatacggcaataacgatgccgcaacagcttggggcattagtccagaaagctacgaaaagaacttggctcaaatccttagtgcagtaggcaaagccattgttgtgggattgtgcaatcccaatccagaaagtgacatttttcaatattatggtgctgaaagactcgatctttttaacaatatcgcccaaaaagtcgcaaaggcacatggtgcacaatttgtggatattttacctgcaatgagaaacttaaaagacaaatcgacatattatcaagccgacgggcaacatttaactgatcaaggaaatgagtttttagttaatcaaatcgtgccagtaatcaaaaaagacttagcctaagccaagtccctcttcatcatcacatgttctacgccgccttcatcaaacggttcgcctacaacttgatagcccaagctatcatagaaaggctttacccgcatttgggcgtgacagtaaactgcatcaatcttattttgccgtaaaaatttatgcacagctgtaatcattttcgatcctagctgttgtccgcgcgcttcttttgacacagcaacgcgtcctagcatccatttaccatcttcttgaaacagacgacaagtcgctaaggcagtcgtctgtttttgattgagtaaataaacctgaacagcaattaggtcctcatcatctaaatctggtagagttatcttctgttcagccacaaaagtcgtgttgcgcaatctttctacgcaatagaattctctagctgtcatttcatcaatctttttaaaagtaaaattatctatcttcatattacttgcctaaccaactattgtttctgccaaaccatttttcattaagtttacgcaattgaccatttttttgcaattttgctaaaccttgattgaccttctgacgcaaagttttgtctcccttacgcatccccacagcgaacaagtccattggcacgcgatcattctgaattaccttgtattcgctacttttagccatgtgagcaatataatagtcggcataaacttcatctaacagaattccttgaattcgtcctgcattcagatccaagaacgaattagaaatcgtatcatataaaactgttttcttagcatgcagcacatcttgtttagtttcataccactgctctgctgttgaaccagtttgcattcctaattcataattcttcatttgtttaaatgaactaatgtcactatcttttttcacaactaaaacctggcgattacgtaaatatggcttgctaaaagctacttttttctgtcgttctggcgtaatgctgtaaccattccagagtaagtctatcgtaccgttacgcagctctgtaacgttcattgaccaatcaatcgtttgaaaagaaaccttaatgccatattgtttaaagactgccttagctaagtcgatgtcataacccgtcaattggccgtttttcttttcaaagcccattggtacaaaactatcgtctaagccaattaccacttgctttttgctggcaatcttattccatgtatcttgagtattagcttctttttgtacgctttggcaaccagttaaacataatgttaaggccaagacgatacctaaaatccattttttcattgcctaatcctcgcttaacggtcgaaccttgagcatctgatccgccacattctctgcaaaattcaagtcgtgggtgataatcagctgggttaaacccgatttttttaagcttaaaatcattttctcaacttccttacgtaaatttggatctagcgcgctagttggctcatcataacaaagaatccgcggtttcatagccaaagctctagcgatagctactcgctgtttctgcccacctgataactcataaggatactgctgttcacggccacttatttgtagacgttttaacaatacacgcgcatcctgctctgcttcagttttactcttttttaataccaaagtaggtgccaaagtgatattttgtaaaacgctcaaattaggaaaaagattataatcttggaaaacaacgccaaccttgcctgaatcataaggtttaccgtcaatcaaaatttcaccagaatcttttgtttccaaaccggcaataattcttagtaaggtggttttccccgctcctgatggacctacaattgtcataatttctccgtctttcaaggtaaaagagatgtcacgcaaaattcggtgaccgttaaattctttgctcaaattttttacttctaacatattctcacctcaactacttgtaataagaaaagtatttttccagctttttcaaaacaaaagcacaaatactgatcaacagtagataaattacacctactaaaactaacggtactagcgttacgtctctggccattgccacattgccggccctaagcaaatcacctaaaccaatgacataaactagcgatgaatcctttaccaagttaattacttcatttccaattgaaggcaaaacaatttttattacctggggaataataatcttggtcatcgtttgccagcggctcaagcgcaaaactttcgctgcttcaaactggccttcatcaatcgattggaagccgccacgaaaaatttccgcaaaataagccgcataattcaaaacaaaagcaaacaaggctgcttgatagcggggaaagacgatatgaataattggtaagccataaaagacaaagatcaattgcaataataagggcgtgccccgcataatccaaacataaaagttaaccaaccagcgtaatggtttaaacttacttttttcacctaatgagaccaaaattcctaatggcgttgctaaaattaacgtccagaaaaaaatacttaacgtcatgcctgctcctgacaaaagagcgggtaaaatttctgcaatatattttaatgacatactctcaccttcatttttctttcctaataaaaaagccctcttaggattaacctaagaggacgactgctcgtgattccacctcatgttcgcacctgctcacgcagaaatgcctcactaggttgatcattttaaaagaaaaaccctcatagccaaacggctacgagggcgaatgtaatcgcggttccacctcatgtttacaaattgctcacgcaacttgcctcaataagttcaataatcaacctttagctataacgggctatcccggattttcctacttttgttcagaagaccaactcacagatgtgattcatactagcaaatatcttatttccaccagcaaagactctctattactttgactagtattactatttctgttctaagttgtttttaatgttgaataaatcttaaatgatctagcaacttttgtcaattatttttcttcataagtatctggatcaacatcaagcaatggactcttttctccagtataaataatatctagcttatacattgcacgagaggtaatagtataaacaagttgagtttcatccaatttatggtaagcagctttagaggcatcccacatgactaccgcatcaaattctagtcccttagccaagtaagaaggcacaactagagtaccatcaactagtcgctgattagcagtcgcaattaaggtcgtgttttcaccttttttagctaattcttcatgcacaaatttagctgcagctaagtctttggtaataacagctgtcgtacgcttattttgttcattattatgcaaaacgttaactaaaacatcaattgcttcatcatcgttttttctgccccaaattataggcttaggacctttacggttaaaggcttcaatcttttcgccttgacgcaaaatttgcttggtgaaattggtcaattccttagttgaacgatatgatttcgttaattgcaccacatcagttttttcaggatcaaataagccagagatctgcttaagtaagctacgactttcatccttagtaaaaatagcctgattcaagtcacccaacattgtaaacttggcccgtgggaaattatacttcaagtaagctaattgaaatggagtataatcttgaatttcgtcaatgaaggcataacgcatctcaaagtcagtcctgcgaccagtgatcatgtcatacaaatataagtaagctgaaacatcattcatggcaatatggtgctgcttaaagttattcttaacttcttccacatgagccaaccaatcattttcatcaatattccacttagatagatcaaccatcttaggtacagctcgcaaaaagctcaggtattgtgctcgcatattcaaaaagtggttgtgcaaaatacgcttatgcacgcccttcaaggctgataatacaatttttctacctaaaaaggcctcttccttagcctcagactcaaattcttgatcaggtcgatcatataactcatttaattcagattggctcattccttcaatagcgtgtgccacccaagccttcttagtttctggcgtaatctttcgattcaacatcttgatcaattcttcacgcgttgcatcaattcggttggccaacttgtaattttcattgaaagaataatagatctccttaattttttccttatcaaagtaaggtttcttcttatcacggaaataaatattcttaaaaataacaccgcgcttattcaagtgctctgcataacgagtcaacaagttaaagaaattaactgaatccttaaacttagaaatattgctgtctgcggtttgatcttcaaactgtctgaataagttttcaacttccatacctggcaaccgtcgcgcaacaaactgccagtaagtcatttgaaccatattttgttcgcccatttcaggcaaaacattcttaatatagtcattaaacaactggttaggactgaacatgattacatcacttgaagtcaggttgccacgataacgataaagcaaaaaggctatccgctgcaaaatcgcactggttttaccagaacctgccgcaccctggacaaaaagcagatctgctttggtgtttcgaataatcttattttgttcgcgttgaatcgtcgttacgattgacttcatctgcgttgatgatttttctgacaaaacttccaagagcatttgatcaccgattgactcatcagtgtcaaacatgttcacaatcttgccatcttcaatcataaattggcgtttcttagtcatatcaactgtaatttcaccttcaggcgaattataagaaactttacccaatttaccatcataataaattgaagatattggtgcccgccagtcatagatcaagaagtgatcgtccttgtctgcaaaagaacctagaccaatataaatcgtctctgttcggtcctcatttttttctttaaaatcaacccgagcaaaatatggtcgcttctctaaacgctctacagtctctagctgcttagctgaatgttgccaagcatgttcacgttcactcaataattgttgctgctggtggattgacagtgctgtttccattgaagtggaataaccatcataatccaatttaacatcgtcaaaaaagtgtgaattaagctctcttgcttcgccttcagctgatttgatagatttttttaaagttttttcgcggtccttgatctgacccataatattatcaaggtgcttttgttcaagttctttttcgtttttttcagttttggctgtagccatctaatcaccttttctttaaaaattcgcataccattttaccatgaatagcgctttcataatagttttcctgctcgtgagaaaaatataaataaaaattgatgaaaactttaactttagagactataatcttgacatattggggtgatatatacatgaaaagattttttaaattactgagaaatgttctcttgcttgctcttatcgctcttggcgtttggacttatcagaacaatcccaatattcgtatcgcaacgcaagactccctagctacacttagctatcgaattaacgaacttctaactaacgaaacgaccatttctcccaataacgaaaaaaagactactaatatcaaaactgacacagataaaacagaaaatgacgattcttcagacaatcgtgtatggtcaaatcctgaagctaaggtttatatcgatattagcaataatgctcaactaagatcagctgcagtcaatgcaatgaacgcttggaatcgtaccggtgcttttacttttcaccaaataaatgataaaaaagacgctcaaatcgtcattaatacagtcgataatagcgacactaatgccgcaggagaaacagcaactacctataaccctgctacaggacatttgttaaaggccacggtcaacttgaaccgttactatttgcaaaacgaatggtatggttacagttacaatcgaatcgttaatactgctgaacacgaattaggccacgcaattggcttaaaccacactaataatgtctcagtcatgtacccaaagggttcgatctatacgattcaaccgcaagatattaaaactgttaaaaagatctaccacgaaaataattaactttaaaagctcacctcttttttctacaataaagtgtgagctttttacgaggagaaaaatatgaaaagaatttatatcgtccgtcacggtcaaacttatatcaatcgctacaataagatgcaaggttggtgtgacacaccattaactacaccaggaattgaaggcgctgaagaagctggtaaagctttaagcgaagtaccttttgacattgcattgtctagtgatcttaagagagcaagtgatacctgtgagatcatcatgaaatataacgccaacaaagacgaattgcagcacatcgctagtccatttttcagagaacaattctacggctacttcgaaggaatggattccgaaatggcttggcgaatgattggtggcagtcacggctacggaacacggcaagaaatgtttgctcatgagagcatcgatactattaaggattggattaaagaagccgatccttatcaccaagcagaaaacgctgaagaatattgggctcgtcttgatgatggttttaaattaatcagtcaattggatggcgctgaaaacattctgctagttactcacggcttcactattagaagtctctggtatcgttatggtgaccatattcctttggttccaggtcctaagaatgcttcaatcactattatgacaatgagtgagaaaggcgaaattaagatacctaagtggaatttaatgcatttatagcaaaataagattaggcgaatcgggcctaatcttattttgtttgtttcccggatttaaaattgaagtgcaacactaagtgttaaacaaaaaggccatgaagacctaaacttgaagtgacgaaaaatcaagaaaggaagatcttcatgaccaattcaaattctagcatttctaagcactatcatcaattaaccagcgtacaacgtggacaaattcaagcaatgctggattccggcataacttcccgtactgttatcgctcaagaagttggctgccataagtcgacaatcagtcgcgaaatcaaacgcggaagcgtcctgcaaagagacagcagctatttattgtatgagcactattacgctgatactgcacagatttattatgagaagcgtcgcaaaaactgctatcagcgcaatccattgaagcattatgctgtctttttgagaatgctctccagacgctttaaagctaaatttgatgccaccagcatcgatgaattcgttggtgaattcaaaaggactatgccaggctacccttgtcccagcacaccaactgtctatcgctatattgatcagggcttgctggacataagcaatattgatctgcctatgaagctcaaaagacgcaggaacaagtgtcatcacggccatagcggtcatgctttgcacaagaagcatcttggcaattccattgaacagcgtcctaaagagattgaagacagaaaaacgccgctgcactgggaaggagatctggttaaaggcgtcagacgcaagaatcagcctgctttaatgactttgaccgaaagaaccacacgctttgaagtagttatcaagattcctgactatcgggcaagcacatgccaaaggctgcttcaaaatgagattgacagacatcctgcctggtttaaatcgatcacgtttgacaatggctctgagtttgcggatatgaccgagatcaaaggctgccagatctacttcgcccacccatattctccatgggaaagaggcaccaatgagaactgcaatggacttctgcgtcaattcttccctaaaggcaaaagcatgaaagataagtcagctgcttatgttcaacaggcaactgatgccattaaccgcaaacatcgtcgaatccttcaatatcacacagcagaagaactcttcaagcaatatatttcctcatagcctaactgttgcacttaatttgacaattcaggattttgtttgtttaattatttttgcaaaacaatatttttatatagcttcactgttattaaaaaacttcctgaaactgtcaaatcttttgtgtaaatagttctttctcgtaaattgattttttaattatttatttaatcaaagtaggattctaaggtgtcctgaacctgaccaaagcctttatgaattcgattgaaataacggtcattgtagctcattgcctgaataccaataaaagcatcaagcgactgttcagttggaaactctgccttaggcttagctttgcgcttgatcacattgttaaatgattcaatcatgttagtcgaataaattgaagctctgatctgcttgggatagttataaaagaccagcagatctggttctatgtctttcaagcttctgataacatggctgtaaaccttgccccatttggtatagaagtcatgcaggacagctgtggcttcttctttgtttgtctgttgatgcacctgtttgaattcgttcatgatcttttcacgatcgtcgacgcgtactttagcgcagatattgcgcatgacatgaaccaaacagcgttgaaaatgagctttaggataagtcctggccaaggctgttttcatgccaacaacaccatcagaaagaaagagttcaacttgcttcaagcctctggacttcatgttttgaagcatctctgtccagacttcaatgttctcactaggagcaatgcagtagtcaatgacttccttatgtccattaggtttaatgccaatggcaatatagactgcttcacgctcaacgctcaaacgtttctcggcgcaaaggaaggtatgtcgcatccaaatagacgcagaaaaacttgtcgcttagcttgcgtttgtggtaagcctcaacctttggaatcatctgcttggaaatatttgatacctgagctggactgtaatggctgccatacatcttttcaattagatcggctatttccctggtggtcacgcccttggagtaaagcttgataatcatgctttccaagatatccgagtgctgcttgtagtcaggcagcgtgtgctgatgaaattgaccgttgcgatcccgaggcacttgcacttcaattgggccaaattgcgtatcaactttgcggaaataagcaccatttctagagttgccagtattccagccatttctggcatagggatcatagcccagaaaggcagtcaattcagcttctagcaagttattaacagcctgttgtagttctttgcgcaataaatcatttattttgtctggattgaatagagcttgagcaaaatctttggtaaaatcattcatgaaggagttcttctttctgtatgtgtttttttgttcaaaccaatcatacgagaaaggaactcctttttctaatgtttaaagaaataaatttaaggaatcattcatccttacacaaactattttacagtctcaacttcctactatttttaacagtaggaagtcttactctaactaatctttagtcacttgttttagtttttattaacttacagtcgcccaaagtctgaatcaattgtttgccatctttttggtggaaaacagcgttttgatacgacaatcgttctttctttttactcttatctttatactttttaataaaggttacttcatagttaatccgactataattacgcttacctggtaaaacagagagcaccttgatctttacacttaatttcttgatactcttctttttatgccattcctttagttgcttagcaatcttcttatagtctgcattttcttttccattttcaaagtcatctgcatttggcgacttaagggtgttgtacaatagcttagctgcatccccaaccttaatcaagccaggccaaatcgggttaacaatatagtcaccttctgcatcctgatagacatctttttcgccattgccttgatattcagcagtaccatcataatcagtgacgtcatcctcactattagaaaattctgaactaatcgactgcgacaaatccgttaccctttcggacttaatagtttgaccatctgccttactcttaatatagatttccattcgcttagcaatcggataatccttgaaagtatagctaccatgctggttcaatttacccgccttacgatcattgatatagatcgtaccattaggaacgctgcgcacttggaaagtggccgttttgatcttcatatcaacagtcttatctgaccaaatgttaacaatcgaatcagcatctaaatggcgaccattaaccttagatttaactaatatatgatagcgaccaggaaagaccatacctaaatcttgatagtaattctgattgccaccttccatttcaccataatccttttggttaaccgtcaaagttgaattagcgtgattggtcttcacctgtgggcgatatacttgtatccacaacttatattttggaaaaagcaaaaaattgcgtccatcttgaatcagtctgatttcaccatgatcgcgattatgacgcaaattataggctaaacgtttagctgcactgtgatgctctttaaagtaattttgaagcggcttcagcgatttatctgtcacatccatatcaggcgttgaagccgtgacatactgagctagctcagttttaggatcctgcattttagctacaatgcggtcaatttgacgttctttagtgtaataaaaattgccaattagccatgcaataccaattaacaggataataactcccgatatccaaattttcttatgttttttcattgatcaaaacaccttttcacaaatccttttaacttagattaacaagttgatcaaaaaaagcaaacatcttttgttcacaaatcaagacgaagttcttattatatttagtagcattattttattttggaggggattgcacagtggaagtaaattttgattttgtaaaaaatagcagcttcaaggaagcctttcctaccgctgaaaaaatccacaaattatacacaattgatgattatcgtgacgttatttcaaattcacgtcttctattagagagtctaatcaaaaaaatttttaagttagaaaatctcagtccatattacacagttcatgatggcgaacaccgtaatttgcgtaataatacacattatttacgcaatgaactagattaccctctttcgatcatggatttatttgacgaaatacgctgcatgggcaacgctgctgtccacgataaccaaattgaaccagatcaaaagcaagcctggcactgtatttgtgatttacacgatattcttgtctttttaattaacagctatgacggtcaagacctatattatttgcgtcccgatattgcgatggaagcacaaactgatgaagaccattattatgtgcgccaaaataagcaaccaaaaataatgaaattgcatgatcatcaaaatactaagaaaaaacagtccgcatctgcaccaaaaaaggcgaaacatgttaaacatttttccagtaaacagcatatagagcaaactaactctgagtcacaaacgaaaactactccttccactaaagacaattggttaagaaaaattaaagaactctttcaccatgattagtcatattgacactatgtcacaatatgataaactatatattatataatttacataccgagaagcgcctatgacgctgccgatacgcaaatgaaaactgaacaagtttctcaaatggggaacggcttatgctagtaggtcgttttccattatttttttacgaaaggagtggttagtccgctatggataatcacaggcaaaaaccttgggctgtcgaacagtctgaggtattaacaaatacaaaaacaaccgaaactggtttaactgaagacgaagttcgaatacgccagcaagctggtttaaacgagctcgcagctaaacctcttaaaacagtaatccaaatggtcaaagagcagatttttgatccaatgatcggtatcttattagtagctgccctcttatctgctatgtttggcgaatataccgaagccattattatcgcgacaatcgtggttcttaataccattattggagtagttcaggaaaagaaggcacagtcttctttagctgcgttatgtgacatatctgcgccaactgcccatgtaattcgtaatggcaaagaattaatcataccggccaaggaattagtagttggtgatattgttaccttgcatgatggggacatggttccagccgattttcgcttaattgaaacagctaacttgaaaattcaagaagcatcccttactggtgaatcagtaccggtagaaaaagacgcagctgctgttttaaattcagattgtgctcttggtgaccgcatcaatatggctttttcttcctcaattgtgacttatggtcgtggtcaaggcgtcgtgacagcaattgggatgcaaacagaaatgggtgccattgctggcatgttagaagatcaaactgaagtacaaacaccattgaaacgcaaattagctaaagccggcatggtcttaacgactatcggcttaattatttgtagtttggtctttgcaattggtgctttctatggccgtccacttttaccacaattcttggttgctatctcattggcaatttcaattattccagaaggtctgccagcaaccgcgacaattgttatggccttaggcgttaaacgcatggttaagcgtaacgctttgatcaaaaagctgccagcagtcgaaaccttaggtaacgccactgtcatctgttccgacaaaactggtactttaaccttaaacaaaatgactgttacacaggcagcaacgaatgacttcagccaaagtcacgtagttgaccagcttgcagcaaacaaaaccaatcaaactttggcctatgctagcgctctttgtaacgatgccagcttgaacggtgaaaaagagattggtgatccaactgaggtagccttaattccttttgcccaaaagcttggctttaaccaatctaacttaaagaaagaattcccccgtttgttcgaacaaccctttgattcggacagaaaacggatgacaacattgcacaaaattgacggtcaattaacggtcttcactaagggtgcaacggacgaaatgttgccgttatgtacacacattatgactgacaatggcgtgcgtaaaattacaccccaagacaaaaagcaaattgcccacttgtctcaccaaatgcaagctgacgctttacgagtactaggctttgctaccaaaatagtggataacttacctgaagcaaatgctgatttggaaaataatttgacttttatcgggattgtcggcatgattgacccaccacgaaaagaagttgcagcatcagttaaaacctgccgtgaagccggtattcgcacaattatgattaccggtgaccacaaggtaactgccttggcaattgcgaaaaagttaaacatttatcagacaggtgacttagcaatctcgggaactgaattagaccaaatgtctgatgcagaattagatcaagctgttgaaaaggctaccgtttttgctcgcgtttctcctgctgacaaactgcgcatcattcaaagcttaaagcgaaattgtgaggtaacagctatgaccggtgacggagtaaacgattcacctgccttaaaggctgccgatatcggtgtcgctatgggtgtaacgggtacagacgtggctaaggacgtggctgatatgattttgcttgatgatagttttaccacaattgcgcacgctatcaaggaaggtcgccgcgtttaccgcaacatccaaaaagtaattcagttcttgctagttggtaacattgctgaaattaccactttgtttgcggcaactatttttaactgggatgcgccattattggcagtacacatcttgtgggttaacttagctacagctactctacctgcccttgctcttggcgtagacccagcaagtaaaaacattatgaaacacaagccagttaaagctggtactttattcgaaaaagacctagttattcgggttattacccaaggaatatttgttgccctgcttactttaactggttacttcattggtaaagaaaccggcaatcaagttgttggacaaaccatggccttcagtattttagcattggcccaaatgattcgttcatttaaccagcattcaaatactgatcccatctggaaaagatcatctggtaataatccatggttaacagtgtcattcattatctctgcatttttcatgggtattattctctttgtcccagcaatgcaagatgcatttcacattaccagtttgtcagctggacaatggttaatcgtagttaccctagctttactttcaattgcacaagttgagttagtaaaaggttgggcaaagtttagaaatatttttattaatgacaataatttaattgaagattaattagttacaaaaagacggtagtacaacactatcgtcttttttgatattaaactttggctgctgccaattggtcaacatctatctgactacgaccaatctgaattgccttttcggtactttcattcaagctagcattgatcatcttatggctaagctccagcaccattggcaaattaacaccgctaattacccgtactcgctcaggatacatatcttcatattccgaagcgactaagtggggtgtcccattttttaaatcagttagcaccaaaatctgactattctgatatttattcatgactttagcaaaacgagccttaaaatctctgattcctgtgtcgtttaattcaattgtcaggatctgatcattcttgcctgccaacatatcatgtgcagacattagccccgcagccaacccttcatgagttgcaattaaaagttccataaaacgcacctctttgtaagcgatttctatagaaccattttaacatatttttgtattaattaagctgttcaatatctgctaataagctactttgttcaggtgttagccgctcatccttttgccgtaacttaagtacttgtagacaagtgtgcaaaatcttttttccttgttccgtcacttgtttgccatccatatcaggcgttacactggctaaaaagtcatccatctcatcagcagtaaccttgaaaacatcattttctccatgaatcaagggcatccgattgagcatttcttcaatcatttgtaatttatttctagcttcttcaaaatctatcttgttcacatccaattctttttcttttattatacaaaaaaacagccacctaagtgactgtcatctttatttcgtattaataattgcgtttgaaattgtagttgcattagattcgatcagttgatgtgaattattaataaaaagggaagccccaattcctatagcagcaaatacaagccaaactttctgtaaaactgtactcttcatgttcccagctccttatatttcttattatataaaaagccgatcgttatggggatggctacgcttacaattaacataattgtaatattatttacctttacttaagagttacttctccagcaacatttgtatcaaaaaagtcagcaatttgatggacgtccatcccttgccctaaagcccacattaatttggtaatcgcactctcagaagtcatatcacaagcagaaatagctccttccagtaaagcctcacgccccacctcatatttggtcaaatcgctacgttcatacaagcattgactgctggctacaacgggaataccttgacgaattagcataccaattgcggctaccatgttgcggcgaataaagttcatcccgcctagaccatatgcttcaataacaattccacggcaaccactattaaccatcgcaaaaagcagattaggatcaaagcctggaaatagtttcaccaacgatacgtgtgaattaattttggtattcaaggttggctgaccgtcatgttctctttgaaaatgttctgaattaaaaactaatccatcggaagaaacggttgctactggtggcacattcacactttcaaaagcatcaaagttggtagtccgcacctttacactgcggcagcccagcataactttattatgaaaggctaaataaacatcaggtggacaagttgctgcagctgcaaaagccaaccgtaggttatcgtgagcgtcacttaggaccacgttaattggtacctgacttcccgtcagcacaaccgggatattaatatttttcagcataaacgacaacattgatgccgtataagccatagtatcagtaccgtgtgaaacaacaattccatcgtaatcattgcggtatttgtagatattttctgcaataaatttccattcttctggttggatattagaagaatctaattgcaaaatatcgcggacttgaatgtcgtacggcaactttcccaacattttaattaactcttcaccggtttccttgggtactaggcctgcatcagaagcaacggaagcaatagttcccccagttgatagcaataatattttcttcatcttgttcccctttatctcaaatcacaatgtcgaccataactattcatgattagatcaattaaaacataggccgaactaaaagttaccgcattttgcttactaaattgaaatggcgtagttttgaagaaaaagctatagtcgctaagagaggctaattttcccgtttgccagctagtcagtgacaccaatttcagttcagtattcacgacatcaatcttcttaagttcttcaataattgttttattaaaaccaccaaatgaaataacaaacagcatgtcattttcccgtgcagaccgccctaataatgccacttcgtcgcgtgcactaggcaaaataattgcttttttaccaattaagaaaaagttatgcgccaaatattccgcgataatttgctgctgccagccagtagagtaaagatagatcgtttccgcttgatctaaatccgcaaaaaatggttgtaagtttaatcccttaaaatatttaaaagtttcagcaatgatcttttgtaaatccgtattgaaatctagcgtttgcttgttcttaacgttttgctcctttcgtgtagctaactcggacaattcaaatttcaattcgctgaaaccgcttaatcccaattttttgcttaggcgaaaaatagcggacttagaaacgtataatttctgagctaattccagcaaactcaactgacttgctacttcaggatatttcaataaatagctaacgatcgctttatcggtctcattaaaactttcctttttcttcatgaccgctgtttctaaatccattctgtttcctttctcatcactgtttcttattaagaaaagaatatcatgtcgtactcaaaaaaggtagccaccctatttgagtaactaccttaatttttattcttgaattgaagttatgttatgacaattaattatttaagttctggccagtatggagcattaactggaatcatgtcatccaaaatcttcttagcaacggaagcatctggtacagtcttgtttaatgcaaatgcttgcagcatcttattgtatgaatgttcaacataagcatcaacaaccaatttttcacaagtttgttgttccatcatcaagcctctttggaagcgacctgctttacccgtagccattggttgaatgccatcagcaccaaacaatgctggtacttcaacaattgaatctggatccatattagaaattgcaccgttattagcacagttagctaagaacttttcatgagtgttaaatgcgatcgcatgacaaatatctacgatatattcagagtgcaaacctgaaatatcccaaatattattcttagcagttcccacctttacgattctttcacattcgccaaagacaatcttttgccggtgttcacgaatttcatcagtacgagtatgcttcggatcagcattagcaacttcatattgtgggaagtagtagtattgcatgtaattgtttggcaaagtttctggctctagcttatattcatcggcaactttcttaaaggtggcttcccaagaagcttcagtatccttgtcgtaatcgccacctacccaatagccgtgctctttgacatattccttcaacttaggcattaagtcttcgccagtcttcttgttgcgaacttctttccaccagccaaaatgattcaaaccataatagttaaagtcaatatcatgccaactgtccaaaccacaaatggcagccattctgtccatatcatcaatcggcatatcacaaatgttaattaccttagcatttggacgaagacgacggcaagcttctgcaacgattgcaattgtgttggagtagttgatcatccaagcatttggtgagtattcttccatccaatcaataatttgcaaaattgcgggaattgagcgaagaccataggccattcctccgggtccagtagtttcttgaccattcacgccatattttaatggaatcttttcatccaagcttctcatgtgatatttaccaacacgaattgatcccataacaaaatctacatcagtaaaggcctctttaggatcagttgtgtaagaaaacttaatttgaggtgctctttccttcatgataatttcaacagctttggcaatcttttcttgccgttcagcatcgttattatagaacttcaactgtcttaatgggaatttatcctgactcttgattaaatcaaggacaaatcctggagtaaaagtactaccaccgccagcaataactactgaatatttcttaccatccataatctattttctcctttaaataaaactaagtttttatctctgtttcatttgccttacgcatatatttatatcatcttctcccacaaatgtattcgttttcaccagcttcagactttgtttcaagttttggaacgcgtttcactacgcgaaatatttttaaattttgccttaagcctaacaaatcaggtgtttaacttgcctttattagtaatagtgtaaaaatgaaaaaaataatcgtttcatgaccaagataaactataatttgaacattcctttaaccacaaaaataaatagtccgtatttgatgatcgtatagttttaatgaaactgtcaaatcttttgtgtaaatagatctttctcgtaaattgattttttaattatttatttaatcaaagtaggattctaaggtgtcctgaacctgaccaaagcctttatgaattcgattgaaataacggtcattgtagctcattgcctgaatgccaataaaagcatcaagcgactgttcagttggaaactctgccttagacttagctttgcgcttgatcacattgttaaatgattcaatcatgttagtcgaataaattgaagctctgatctgcttgggatagttataaaagaccagcagatctggttctatgtctttcaagcttctgataacatggctgtaaaccttgccccatttggtatagaagtcatgcaggacagctgtggcttcttctttgtttgtctgttgatgcacctgtttgaattcgttcatgatcttttcacgatcgtcgacgcgtactttagcgcagatattgcgcatgacatgaaccaaacagcgttgaaaatgagctttaggataagtcctggccaaggctgttttcatgccaacaacaccatcagaaagaaaaagctcaacttgctttaagcctcgggatttcatgttttgaagcatatctgtccagacttcaatgttctcgctaggcgcaatgcagtagtcaatgacctccttgtgcccattaggcttgatgccaatggcaatatagactgcttcgcgctcaaatgtttctcggcgcaaaggaaggtatgtcgcatccaaatagacgcagaaaaacttgtcgcttagcttgcgtttgtggtaagcctcaacctttggaatcatctgcttggaaatatttgatacctgagctggactgtaatggctgccatacatcttttcaattagatcggctatttccctggtggtcacgcccttggagtaaagcttgataatcatgctttccaagatatccgagtgctgcttgtagtcaggcagcgtgtgatgatgaaattgaccgttgcgatcccgaggcacttgcacttcaattgggccaaattgcgtatgaactttgcggaaataagcaccatttctagagttgccagtattccagccatttctggcatagggatcatagcccagaaaggcagtcaattcagcttctaacaagttattaacagcctgttgtagctctttgcgcaataaatcatttattttgtctggattgaatagagcttgagcaaaatctttggtaaaatcattcatgaaggagttcttctttctgtatgtgtttttttgttcaaaccaatcatacgagaaaggaactcctttttctaatgtttaaagaaataaatttaaggaatcattcatccttacacaaactattttacagtctcgttttaattacaaaatacgactcaaactagtttcacttccatattttgtagtgtaattttgaaattaattataattttaatatctttctgctattttctatacaatataatatttttaaaacatatctttgctaaacgctgattttatcccaactcttagtcattagtacttgataatttacagataacttaggttataattatatatttttttatataaatttagcctttatcaaaaaactttcgaattatttattaaccgtatagtttttattttaggtcgccctaagtcttgataaactagtactctaaaaaaataacatccatgttttttatttaacacgatacgttattaaagcttttcatgtatagactttgtttttaataatgttagtatcattccatgaagagacatataacgagctttaaggaattgactactccttaagcaaaaaaatgacttataaattggaaatccttttcgtaatataaggggattaagaaaaatgacaaagaatgttaagctattatcacttatcggtatcgcagccgctttagcaggtggaagtgttgctatttcaaataataacaactctactgttcaagctgcttctatcacattacctgctggttacaccaagagtgccattattaaatggaaccaaactggtaaagcaagtaaggctttgattgatgcttctaaaaaaggcatgaaggaaaacaccaatagtgatgcgggttcagataatacgttagttaacgtgactaaattaactgcgtctcaacaaaaagaactgagccaatacactttaagcttaattaattctgcacgtcatcaacttggcaagcaaggctggacttacaaacgaggtgctttgcactttgcaaatcgtgtagctaacgaatactacagccataacagatcttgctgggatgccgaccactatgttactggaattgaacgcgcagctaaggcttctggccttaactcaaaagtaggtcaagtctacgaagatgaagctggcttacctatctcttcaacatacaatactaacttacgtccaatgtcagtattgaaaaaccaaatttactttaacgtaaagcaaatgctttttggcggttttgcaggctctgacagtcagatgaatgactcatctagatacactgaatgggaacacgctggtgatttacttggttgccgtactaagagctacgatgctaagactaaatactttggtattagtttcagtggcttaaagggtgaccaaagcaaggttagtgttcacatgatgggtgttgctaaatgttacatccaaaactacagaaaattcaatcattaaaactaacgctgtagttaaaaacttaatacagtttcctaatccaagagctcaagtagttcagtcaactatttgagctcttttatttttgcccatttttcatcaaaatcctgtcaaaaaaatgcagatattcacacattttcaattaagctatctaattgtttgtatacattagctaatactaatagtgtgttaagttattatcttatcactattttgtctataatccttgataaatcaatgtttccagcaataactgtacataattaacaacagtacagcaaattatgattacaattaataaactttttcaaaagcatttttacgttatccatgcgggattttcgcttacacaatctattacattattgttatctaaaaaaaggattgctatattaaatagtaactggtatattctatatcaatatgttcaatgaacataaaaaagggaggataaagatgtatttcactactacaagaagaaaaactaggaaagacaggatacatatccaattctttgcacaagtcttaaaaaaagacctatcacaaggaactgtttacaagtattcagttcaaagattctgtgaagctgcaaatatctgtcgcggaactttttaccgcaactttaaaaatttgaatgatctatttagtcaagtactgcaattcgaaatcaattcttgcttcaacaatccccaatcaagtactttacataaaaaagcacacaacttactgatagaaattgaaactaatgccacctactatcgaaatgtacattctcttgcctcaagtcaaattcgaacacaagttgaccaagctctttttcgtgaaatgcaaaaattgctattcaatagtaatctttctaataagcatatccaaagcatttccagtttgattcttattcgaattctagactggattgctcatgactatcaggacaatgtcatcacagtttatactgacgttgaatgcctttttctccatcacattaaaaaaagttgctagcaacgaataccaatgtcattaagttaagacattgacaattaagggtgcttttttagagatcgaatcatttggattcgatctctttttttgtataaaataaaggcgaaaagaccagccttttcgcctatcttatatattatatattttaaaccttcaaaattattgccagaaagatggtgttaattatgaaagcccttcataagaatattctagaacgtcttgatcaaattatcaataatactggggatcatattcacgattttattaataatcctcatgcttttaccaggaaacgcactttagatgcagcgacagtccttaaaactacaattaacatgcaaggtcagaatttaaacagtgaactctttagagcttttggcgaagatgcaactaaaaagaacgataaagtagttagtacttctgcctatgttcaacgcaaaagccagctttctcctgcttgttttaaacatattctgactgtttttaatcaaaatctatttaatattcaactttttgatcatcactaccgtttgtttgccattgatggctctgactttaatcaaatctggaatccgaaatcgaataacattgtacaagcttcttctcataaaaagaaaccctattgtcaaattcacgttaatgccttatatgatctattgaataatacctaccaggattgtatttttcagcctaaatcagaaatggatgaacgcaaagcggctgttcaaatgcttaaagctttgaattgtggtccatatattgtaacaatggatcgtggctacactagtttcaatatgattgaaaactgcaatcgcctgcctaactgtcattacataatacgaactaaggctggacaaggcggagttaaagaaataacgacattgcctgatcaagaatgtgatcgtgagatttcctgcctggtaactacttctaactattactacatcacgcataaagccagtgagaatattcaccatgtccagcatcattatcgccaatatattaagtatcgctctaaaaatacccaggatctaagctgggattttggcgagttatgcacaataaaatttcgagcctgcaaatttagaattaatgatgccaaatcaggcaaagaagaatgggaagttgtgctaaccaatcttgatcgaaaaaattatccgctaaaaagaattaaagagctttatcatctgcgttggggtattgagacctccttcaagaaattgaagtattctttaggcagtgtacagttccattccaaacaagataaatttattgaaatggaaatttatgcccatatgattatgtttaatgcaatcagtcaaattgatgcacaggcctatattccgcaaaagcattgcaagtatcaatatgccatcaatttcaagcaatcatgcttgattattcagagcatgtatttggcttcttctttaacgcaagattttgaacggatccttattcagatcagctattataccattccaattagaccaggccgcaaggacaagagaaatattaagcccaaatcagctgtatattatttatatcgcgtagcttaaaaaagcagaatctgtgctatgccttatttgttgtacgaaaaaagcaccaatttaaccaattaaatgttaaatcagtgctttaaaagtctaatattaattgtcaatgtcttaacttaatgacattgaaacacaggggtcttgctttttttattatagacaaaaaaagcaaggaactacgcgggaaaggcatgatttctagctttcagcctttaattaaataaaaaatctatttatgatatacacaaactgttctacagtctcaagaattgttattatcatttatttcctttacaatacctgatttgtcaaacaactcataaaattccttaatgttttttttagtttgataaatatttctaaccgtttgtcttcctcgacaaaaagtaaagtacagcttttctttagcacgtgaaattgccacaaaaaatgctttacgatcagactcagattggtttgagaaactccaaaaagcactatcttctaatccaataaagtaaacagaattatattctagtcccttactcttatgtatagttaaagttgctattgaattctttcctaaataattgtcaattatttctttccatatttctttgatgtcagtatttaactcatttattgatccgcattctttaagctgctctataaattgagttttcgttctatttaattgatctatttctaagtattctggatagtaaacttgaagcctattaatcgtaaaaaagtctattatagattctacgattttacagtaataattactttttgatctattctcatggacttgaaccaatagatttttaaatagcttatcaaggaatacatttaattttttgatatatttttgctctatttcagcatcagctaaattaatgagaaatatttcagaagtctcatctaccagttcttgccactcctgtccatttatcacgttaatagacgctaaaatcattttcaaaatcaacttaactataggttcagagaaagtttcagtatactttgattcaaccctaacagttacatttttagtttttaaatactcttttatatttcttatgtaatcttcagggcgttgttttactaatatagcaatttctgaaggcttaacacccatacgtatttcttttataatattttccccaacaatttcagcttcttttgagggttcgttagtttctattagaaaaactttcccttcatccttatttttattaattattatgtcagggtttatatccttatctattttttcatacataagtttttgtaatttcactatatttaaagctgatcgatgattttcttttaaaaatacctttgttgctctaaattcacgcgtatactttccaaaaatttctttatccgcaccagcccataacattatttgctgcttattatcccctacagccgtaattttactttcactatttaaaaaacattcacggaaaatatcatattgcaaaactgtagtatcctgaaattcatccagaaacacaaaaggaaaagctgatcgaataatatgtcttacatatttattatgctggataatatataatgctagtctagaaatcatttcaaaagtcaaatacgttttttcttctcccattaacatatacttccaaaatttataattattactctgagggtttatatcattcaaatctactttcaaaagatcatttacagcgtttctatcaggaacatagccgaaggcatgttcgtatatttttgtttgagttgaattagaggagatttcatactgaggtctaggtcgtaaatctttcggcaatactaaataaaatctgtccactattaatttagcaaaagcatcaaaagtttttgaaataaatctacttccctcttctttaccaactctttttgaaactctatctttaatattctcagcagcatcacgcttaaagcttattgctaaaatattaaaaggagcaggacataatcctgtttgaaataaatatgatgctttctgtgctaataattctgttttacctgctcctgggcctgcttgaaccaaaatattatcatttgtaaaaatagcctgttttgcatttgattctaaaactatcccattactaggtttccattgatccttattcatcatttttcttatccaatttattctttacagactcaagtaatctttttaattgttcaggtaaattattgcatagctcttcttcagatatatcttccaaagcagtaaaatgtactaatggttttcctattcctaagaaaagcatattataccatctcattaattctatatcatttttatcataatcaacttcttcctctctttttccttttaaagttctatccaaaatttttttgcgttcatccgctttggtctttggacttcctgatgctattcctttatatttatccagaaaagctgctaacatcataaaatccaaatctaaaggaaaggaaaagaaaacatcatacttttctagttgtttcgtcaaatccaacaaattatttttattttctgctaaatcggcgcatttgttttctattttttctaattcgtcatcattaggattaaatcgcttcaactcatcaataatatctttaattcttttctttccgcctaaatatctcccataatcaagatctaacaaagttatatgtgctatatttaagctttctaataaatcccacaaataattaaccattcgtccagctaaaggtacaattgatatgtttgcttcatctaaaccagtatacgaactaattattttcgataaaactatttcttcactctcgccttcacctaatattactaattttgaaaaatacaattctgggtaagtttgaaccgctcttttaataaatttatatttttctcctttgtcatcaggcaattttattttcttcacttctgtcacggcatcttttgtcaaatgaaaatagcgtacattctctggcaatactctttttattattgctggagaatgagaggtgattatagtttgtgtattatctaatttagttatgcttttaactttatccattacttttccaagtaaatgaggagaaatatgattttctggctcttctaatgcaaatattgttacaacaggatattcaatttttatatcatcctcttgtaccgtattttctattgctaaaacacttgcaatattagaaatataaaacaatgattttattccgtcactcatttcatccacagaaaatacattattagttacatttgaattaaattcaaaccgtatacgactcataatcttattgatatctatgctagatacactagcttttacattagaaaatctagaattaggttctagacttttccattcttgatttaaagtatcttgtattaatttacttcctttttcgtcccaaaatgtatcatttaattgtgatgaaatgcttactatcttttgtttaatttcatcatcccaattaactctttttatcaattgagaaatcattccatctgaggtattacttaattgtcgttcaggatttctaactgcaggtacataaatgaactgtatactgcttaactctgatcttctagctactatcttattttcttcattattatcttctagagaagtcatgaagtaaatatttgtatctgctgttccatcagcaattcctgaattcgtccaagtagattcaagtctaattcgtaaaagcggcttatcttgtccgttttttatgattagccgattccaatactgtgcttcacacttcttatcttcgtctttattagctttatctaactcaaaaacagcttcaatatataggtccctcgattgactatcttgatttgctgaatttatataaaaatctgattcatgtattattctatccgatgcattatatgagaataatttattaacttaaacttcccacactaaataagccagtaatctcttgatcttgcttggctttaggcttctatattatttttgctagttttctttaacaatttttgcatgtatttgggtaaacgattgataaagtcagccgtgaattcagctatttgtgcttcactggcatgaaagacttgctttacgctggccagcattgcatcagtaatcaattgcaaggaatggctaaaagtaatgtccgccagctcatcaatcatgcaatagaacagctcgcctagcgtgcgttcatcttcatcgtcccgcttggcaactgacataagcatgtagcgagtaaaaactatggcaacatgagcggtcaaagcatcgtaagacaggccatgatattccgtacttagttttagataacttttgcaagttttgaaaaaaacctcaatatcccaacgcttgccgtagttgcggataatttcatcttcgctaagcgacatgtcggtacaaatgattgccagccaatccttgcgattggcacggtttctaacgcagacaatccgtgcatctattttagcaccgtctttgtcctggcgtccgactttgactgggattgacagcaggtagcgagaacggccgcatcgctttttacagctgcgataaatctgtttgatgtttttgcgttctccctcaaattcatatttgattttggagctaaccttaaccatggcaatcacatccagcttcctttgcttgagctggacgatttgatgtggatttgagaaccagctgtcaaacagcacgtacttggcttgatgacctgctttcatagcttggtcgattaaattaaccatcacgtctgtgcctttagtccgggcaagcatacgtctttggccagcaatggtgcgctgatcaaaaactttattttcgccaatcatattctgtagcttctgagaagacagcagcactgaattgattggcatgaaagaagctccatcagtccagcccagggtcatcatgcgaaaacctttcttgtaagtcattgatacatggtcaaaaactttggcgactaattctgttttcttgaagccggtcctagagaagtaggaatcatcgacaacaaagcaatcagcccgtttttctgaagtcaaagatcgcaagtggttattaatgatttgcgcagacagaagtgtggtgaagtggagccaattgacgtgaacgttgcgcataaaacggtaatatgagttcttggaaaaattttcttgaaaatgatccattttcagctgcatatataagctgcggtcacgaaagacattgcttaaaacgtaaagaaacaagctgaacaggctaatgcctttttccttgcggaagccacattttctcaacagcttgatcacctgaaacttcttgatgaagctgatgattgagtttgaaaatagttgttcattttgttggtcaggagatggtaaaatagacattggcacaagcctttcatgcaaataaattatgttttggtcaatataattatagcaatgaaaaggacttgtgccttttatatttgtcaaaacacgcagaatcacaatgaaacaagcaattttgcgtgtgggaagtttaagttattaagtgcaagaagacaggctgttttccctgaaccatttgtaccaataaatgctgtttcttttgaaaaatcaattttcgtttcttcattgaacgatttaaatcccttaattagtaatgtctttagtctcaatctaatccccctcatctataatatatcgttattcaaatacacttaactaatgccactattcttaattttactctttttatcaaaaatcattatttaaatattcaaaaaattttatttccggatttaaaattgaagtgcaacaccaagtgttaaacaaaaaggccacgaagacctaaacttgaagtgacgaaaaatcaagaaaggaagatcttcatgaccaactcaaattctagcatttctaagcactatcatcaattaaatatcgtacagcgttggtgaattcaaacaatattgatgtctatgaagctcaaaagacgcaggaacaagcgtcatcacaaccacgacggtcacgctttgcacaaaaagcatcttggcaattccattgaacagcgtcctaggagattgcaaacagaaaagctccgctgcactgggaaggagatctggttaaaggcgtcagacgcaagaatcagcctgctttaatgactttgactgaaagaaccacatgctttaagtagttatcaagattcctgactatcgggcaagcacatgccaaaggctgccagatgatctattttgctcacccatattctccatgggaaaggggcaccaatgagaactgcaatggtcttttgcgtcaattcttccctaaatgcaaaagtatgaaagacaagtcagctgcttatgttcatgccattaaccacaaacatatccaaatcttccaatatcagacagcagaagaaatcttcaagcaatatgtttcttcatagcctaactgttgcacttaatttgacaattcaacactttcaacctttagctatatcaatctaatctattccaaattagattatcagtaagcggaatagactggagtcttatttgttcatcaaagtttttacattcttttcttaaaataagtactggtctaacatcatttaaaaatttcaaatttccttcatttatcttattatgaaattctcggtttagctcaaacttacttattacgtgattttcaatatccttcatttcatttattggcaatttcttacttaatttataaagatctaaatagtaaataaagtctgctttaatttcatcattccatttttttacatttgttgctggaaatataatattagacaaaaaaattctatatgaattatcatactgtgctttattttcaaaatattcaaaatttttatttgcatgttttaaatacaaattagttctcatacgatcattttcatataaaaaatattttatactatgtggattagaaaatatcttgcattcagtaatcgcataggcttgatcatcatctataagaattatatcaatttctttttttcctgatttatcacttattgtatttttctttttttctatactatatccagactgttttaaaaattctattacataatcttcaaaccaatgccctttcttattactccatttattagtattttccataagtcttgtaactaaatatactggatccacacaataacaagttggtaaatagacaatattgccaaatataaacggagcatccattatatctctatgatacgtcaacttttttgtgattttaccgaaactgtcaaatcttttgtgtaaatagatctttctcgtaaattgattttttaattatttatttaatcaaagtaggattctaaggtgtcctgaacctgaccaaagcctttatgaattcgattgaaataacggtcattgtagctcattgcctgaatgccaataaaagcatcaagcgactgttcagttggaaactctgccttaggcttagctttgcgcttgatcacattgttaaatgattcaatcatgttagtcgaataaattgaagctctgatctgcttgggatagttataaaagaccagcagatctggttctatgtctttcaagcttctgataacatggctgtaaaccttgccccatttggtatagaagtcatgcaggacagctgtggcttcttctttgtttgtctgttgatgcacctgtttgaattcgttcatgatcttttcacgatcgtcgacgcgtactttagcgcagatattgcgcatgacatgaaccaaacagcgttgaaaatgagctttaggataagtcctggccaaggctgttttcatgccaacaacaccatcagaaagaaaaagctcaacttgctttaagcctcgggatttcatgttttgaagcatatctgtccagacttcaatgttctcgctaggcgcaatgcagtagtcaatgacctccttgtgcccattaggcttgatgccaatggcaatatagactgcttcacgctcaaatgtttctcggcgcaaaggaaggtatgtcgcatccaaatagacgcagaaaaacttgtcgcttagcttgcgtttgtggtaagcctcaacctttggaatcatctgcttggaaatatttgatacctgagctggactgtaatggctgccatacatcttttcaattagatcggctatttccctggtggtcacgcccttggagtaaagcttgataatcatgctttccaagatatccgagtgctgcttgtagtcaggcagcgtgtgctgatgaaattgaccgttgcgatcccgaggcacttgcacttcaattgggccaaattgcgtatgaactttgcggaaataagcaccatttctagagttgccagtattccagccatttctggcatagggatcatagcccagaaaggcagtcaattcagcttctaacaagttattaacagcctgttgtagctctttgcgcaataaatcatttattttgtctggattgaatagagcttgagcaaaatctttggtaaaatcattcatgaaggagttcttctttctgtatgtgtttttttgttcaaaccaatcatacgagaaaggaactcctttttctaatgtttaaagaaataaatttaaggaatcattcatccttacacaaaatattttacggtctcattttaccaatatcattcaaataattattaggtataggttttaaatgattattaattatttttatataacgatcgggtaagtcaaaaaaatttcttggaacatttcctgatattaagtaatctacctttaaaaacaatttatttttctttaaagaaaaaaacacttctgctataatttcacaattatattgaattatatttaaaacatccaaccattctattattgggataccatataaagtttctgcacctaatttttcataatcttcacgattctccttattatcaggtaaggatggtaatttataaaataaattttctgcaattccttttaattggtataagccccatctacatggattctttttatctatagaataaatatatttactatttaattgtctaagatccgaattttcatttctatttacaatataagtagcacatatatcgtttacagaatcaacaatatatttctttccatgtcttataattctagcatttccatatttccaaaactctattatgttgtaaaacatgtctatatttcgatcataattcgtcgaatttaaggcttcaagatcatttatagaatttacattttttaaattagatgcaagacgtctagaaaaagaaccgcagtttatttccatcttttcattcaaagtttgtttactattttgattatggaaagcatttattacttgatcaaaattagtaccataatccaaagtctttgattcaattatttctttctttatattcttaaggctctctaaatcctttaaaatcatagatgccttattttttattcttggacaatagtctccaactatgatttgtttcacaacttcaagatacttgtctctagtatttgaccaattaccataatcatcaattatcaaattcgatgatttaatgatatctaaaattctagtaagttttgaaaaatctttcttacgtaaattgcaataataaattgaacacttaagctgcttgatagatatgatccaattctctttcaaagatttcatctggtgtatgatatgccaatatttttcttggtagcgaattgcaccaggtttcaatgtcaatgatttcctgaagagaatagttattgatgtaatcacccttaggaatgaatctgcgaataaggccattgtgtctttcaacagtgcctttatcgcaagaagtatatggatgggcgtaatagactaaggtattagatacttcctctagattggaaagatccgcaaactctgaaccattgtcagttgtaattgtcttgaagatttcattccagtgctcactatactgtttatgtagagtttgaaaagcgctcataacactggcagctgtcttgtctggaatacgcaagattagaaactcacggctcattcgctcagacaaagttagcagtacttgatcatctctagtcttatgtcctaagactaggtcgcattcccagtgaccaaactcttttcgatcattaatctctttagggcgttcttcaatgtttcgacctaatttcttcttgttcttatgaacacgatgaattttagtattacgctttaacttctcaggcaaatcagagtttttgatagccaacaagccttgatctacatagttatatagagttctagggcagactatctggtcgctgctaaattcacccacagccaagcagcgattggcacatacatcaagtgaccaattgtcttcaaagaaatgcttattgacatacttgataaagtcagatttcttcaagaagtctggtttgcgaccacagtggcgtcggttagtctgataaacactttgaccatgatcagccttgtaacgcttctgtttgccacgataaagaggaacagtgcctcgtctaacttcgtaactgattgtagaaggcgaacagcacagctcacgagcgatagctctgatagagcagccatccttcaagcgagtttgaataataacccgttgttcaaatgataaatgctttcccttttgatgctcaggcatgatagaatgtaaagagtccatttgtgacctcgtttctgaatgttttgtggtaattacattttatcaaacaggtccaaatggactttttatttttctaaagtgttcaatttgattttataatcggcgaaaatctttcttatctaaattcaagtatttaatgacctcattataaaattgttcattgtttctattaacatcttctaaagcacaaatagacggtctcttcatagaaactttatgctcttctttcttcgacttctttgacattttgtatcctcacttttcagcgtttaatcacaattcgtttaaaataatgattaccatcagaatctctaaaaacaggtgaaacgattagttcatttttatcattaccaaacttttttatttcttttgccccctctattatagattcagcctcaaaattatattcattaccaaaacaatgtggcataattaactcggcaaatggtatcattttgtaaccattagaatattgaggacaaaatatctttttttcataaccatcttgtctatcttgaatacagtcaatattcttccataagcaaaagccaactaattcagcactttcttcattatttccattgcataatgcacgcaccttaaaactatcctctttattcacttgtattgtgtcacttagatattgaactttattacctgtaactcttatttcaagtacttgttcttcggatatattctttattccaaacgctatcaaaccactaataattccaactacagcaaataaattttttcctagttgatataaaatcaatggattactcatgaccacaggtatataaataagctgtatagctaaacttactaaaacactaatttgccacaacccaataggatacttattcgccaaaacactagttttgacgtttaaactactaaaatatactatgaagagagttacaattaaaaatactattatccatgtaaggtagtctatccaaagattcttacttatgaacatcaatattaataacataatatttactaatccaaacgtagtacacgatgaaattaaaagtgaaatcagaaattgtcttgatttcactttttttagtgtcaacttattttttttcatttgtattgtcaccttctaatcaatctcgctagtcttcaaacgtacaatactactcctaaacttatctaaatcgattcctaaaatttgagacagaatttcatttggaaatacaataccatacatttcacgtagtttatcattaagatccttagggtgaacaacatcatgctcttctagtaattcaaatgcttgatttagagccttaggtttcgacatgattttctcatcatccattatttctttagtacgccagcctctatagcttatctgtttttgtagcttgatatattctttatcatcaatcaactgaagatcatgagcccgatgaaccattgcagctattgatacattccacttagacttaagatttataaatgtatctatattaataaatccatttttagttaaatcagattcaaagctttcctttggcattaagaatgctgacgcaaattgattagcttcattttcgatagttctatagtcttgtcccagtaaatcttcttgaggataatagagttttgcatgcattgcatagtgacctagttcatgtgctaaagtaaattgatccctgaagaaattctgcttttttccattcactaatactatgtagtattgcttttcacctatttcaacataaccgcttctagcatcaatcttattagaattaaaatcaacattaacaattatcaaaccatgacgttccattaaatccacaatatcgctaattggttgatcatccagattccatattcttcttaattcattagcagcattttcaggtgattcttccaactcaagcttcgtatctaattcaggaaaatctatataattttcaaaataatctcttagatatgccgctgcttttttataagttttactaggctgtttttcagattgagtagctgtcaatctgctacgataaaaagtaccatcatcttggtatggtactttctcgaagtctgtaaagaaatataatgggaaatttagtacttgaactattttttgaaaaacagctgaactaatttcaattttgttgtgctcgtatttcgatattgcttgtttagaaacaccgatttgatcagccaaagcactcatagttaaatgattaaataaacgcgcttctttaagccgttttccattaatttgaagtgacattattattctcctcactcgttgtcggcctcttagccttattagcattccatttgacaatactatcagacttattaccttccacattattcttttgattatcatatctagttgtatcatcatcaggactaggagatttatactctggaattactatctcatctatgacattgaaattgttatcaactaaaatttccaagccattaacagcttcatcatcaaaataatcataggtaattataatggttctttttaatttagtaaaatcattacctaaaattttctttgcttcttttaatctcttttctgctactactttattatttccaatcccctctaatgacaattgctcagcagaagcgacattattaattgttaaaggatacatatagtgagtatatttaccattttgaatcttacgttgaacgactagaaaatttgtatatgaagtaactaaatataaagtaccatctttgacattaaaaacacctattgccttccaaatatgccggtcaattgaaatctcgactaaccatggggtagaagcaatatcatcagaaatagtattaaatctgtggtcccaggtattaaaggataacccattaatatattctccccctgcttcttccatataatcatccctaacctgagatttagtaatggtcgcacctggaacgatctttcatagtacttcatcgtcagctttaaaaatattcatgtagtatttcctccataaaaaatatgctatctatttacgcttataatagacttatttactgcagttttcaactaatagttgacaaaattagtgcattttctaaaaggtgatataattatctttgataaaggaagaaggtgactatatgaagaaaactcaacacgttgttcacaaccataacggtggatgggatgtcaaagcttctggagcaaaacgagcaaccaagcactttgagactaaagcccctgctgtcgaatttggccgcaatattgcgaaaaaacaacatactgaattttttaatcatggaaaagatggaaaaattcaaagtcgtgatagttatggaaatgacccatttccaccaaaaggataggtgtctattaatgaatagtgatactaaattagtatttcagttgttagaaaaaaatgctagctcagagcgcccaaccaatattacatgtgacaccagcgacattctacaacaatctggtttgtctattgcaaattttaacaaggctattagtgagttaaacgagctaaatataattaatattactccaggaaataatattgttgctgatattgaattgcttcgaatcgattagcttagtaaatattaaatagaaaagtatcttctatcttgatgggatcagattaatactgaagtcatcattttaggagatattttttgttggaaaagacaaacagccaattattgttttaaaacgccgtcaaacccaacctcaagttcagtcggaaaaagctcacatgcacaatatcccttactcagccttaaaagaaattcaaattaatggttttactgtgaatcaccagaagcctatatgcatatcctgttggatagctattcaacaataaaacagggtacatagtaaagcactaatgatggtcaattagcaattttcacaaaattttgatagtgcccatccacaagaatatttttagcttaatcgaagctactaaacgatattgccttattagaactgacacaggaaaatcataatcaggaaaaaactgaccatcacttattaataactaaacatgacaacactattgcccgaaaaatcttatatcgaactattgggcaaatggagacagttaagtcagctcaaccttgtcatatacggattactatgaccataaaaaacagctttctgaagccagaggctacaagaaagctgctattgcgtctatgcataaactgatacggacaatctatgctctgattattaatgatcaaccatatgattaccataaagctctccgtaatcaaagataatgattaatcaatttataagtatatcagcctgcacaaaatgattaaagtggagactggttttgtcatgcactgaatttggtttcagactgactttgatcttattcgcactattcaaattcttctttaaatcattgataacacttgattttagatagaaaaaattagtttttaggattgggttgaataagtaaacatttaggaaattgtgattcgctataattaaaactaataatttttttctttgattttaaaattttgatttcaaaatttcccaaataatatagctcaaaatatgactgagaagaagtatgatctttttcccatcgatcagcatatcgtttcaaattatcaaacaaagttttacaacgagcgttttcaaaggtagtaggattaatgattacctgtggtttagcatttacaccgtttaaccaagcagctggaccagaataatttaaaattaaactttgactactgtcattattaaagtatctacaatatgcctgtccataatatatatgaactgctttatccaattgtgcttcctgcacctttttaaaaaacaaattaaaatcaatttgatttccatccgcatcgtacactttttgatttaaattatattctttataattatcccacagttcaacaatctctcttaattgatttgtatgatgcgcacgcttttgataattataattggaattttcattttttctattataattatcaacaattctagttggaatatctggatgattatttgaacttactgctattttttgtgtcggtttcaaatttgcaattaatccagttacttttgaaaaatcaaatattattttatcattttcaaaatagtaaatttgatttttagtgctatcctttcgatgctcagcaataaattgtaattttcttggacaatcaagtgaatgaaattgattgtgttttctatttgcataatatggtcttattttatctggatgattatcaaaatcaacaaataaattaatgcaactcagttcaactgaacattctttagcacagtaaaaaatagtattttcacaaatacgacggtaaccatatactttatttatgtcttctaaatatattttattcgcgtcagcagcagtaaccattccatcaggataattatcaggatctttctccattaatcttttacagaatgctttttcatattttggcataataatttctcttttcttttttaattatattataggatcatgcctcacatatggaataaaatttatagattttttaatatttattgtcgaccgaatttaagattgacgtgcaacaataagtgttaaacaaaaaagccatgacgacctaaaccaatgtcatcaagttaaaacattgaccataaaattgtacgtttttgagaccgtaaaatattttgtgtaaggatgaatgattccttaaatttatttctttaaacattagaaaaaggagttcctttctcgtatgattggtttgaacaaaaaaacacatacagaaagaagaactccttcatgaatgattttaccaaagattttgctcaagctctattcaatccagacaaaataaatgatttattgcgcaaagagctacaacaggctgttaataacttgttagaagctgaattgactgcctttctgggctatgatccctatgccagaaatggctggaatactggcaactctagaaatggtgcttatttccgcaaagttcatacgcaatttggcccaattgaagtgcaagtgcctcgggatcgcaacggtcaatttcatcatcacacgctgcctgactacaagcagcactcggatatcttggaaagcatgattatcaagctttactccaagggcgtgaccaccagggaaatagccgatctaattgaaaagatgtatggcagccattacagtccagcccaggtatcaaatatttccaagcagatgattccaaaggttgaggcttaccacaaacgcaagctaagcgacaagtttttctgcgtctatttggatgcgacataccttcctttgcgccgagaaacatttgagcgtgaagcagtctatattgccattggcatcaagcctaatgggcacaaggaggtcattgactactgcattgcacctagcgagaacattgaagtctggacagatatgcttcaaaacatgaaatcccgaggcttaaagcaagttgagctttttctttctgatggtgttgttggcatgaaaacagccttggccaggacttatcctaaagctcattttcaacgctgtttggttcatgtcatgcgcaatatctgcgctaaagtacgcgtcgacgatcgtgaaaagatcatgaacgaattcaaacaggtgcatcaacagacaaacaaagaagaagccacagctgtcctgcatgacttctataccaaatggggcaaggtttacagccatgttatcagaagcttgaaagacatagaaccagatctgctggtcttttataactatcccaagcagatcagagcttcaatttattcgactaacatgattgaatcatttaacaatgtgatcaagcgcaaagctaagcctaaggcagagtttccaactgaacagtcgcttgatgcttttattggcattcaggcaatgagctacaatgaccgttatttcaatcgaattcataaaggctttggtcaggttcaggacaccttagaatcctactttgattaaataaataattaaaaaatcaatttacgagaaagatctatttacacaaaagatttgacagtttcatatcaccttgagtatcacatatcctttttaggtctttaatagcatcttcgtaatttcctaaaaaatattcggttaatccctttaaatacttaatattaaccttaaattcattataatcagctatttgttgccataattctaacgctaattcaaagttgttattttgcaaagcatatatgccatttattacatttgcgaaattctttaactttttaggaatatattctacctttttactggtattcttttcaaaaagtagccgtacacccttttctaaaatttgatattttggattattatcagctaatctagcacttactattaaagcatcactattattactatttacatccgcttttaatatccgcaattctcctacactagtgtcatttttatctataacagcattaatatccgcttttaatccatataaattatgagtaatatcaattgatactgaaagatcaacatattttttatgtttatctatagcatttaaaaaatctttttttgtaattattccttgtgtacttctacattttgcacatattcggagcaaactattttccaaatcgataaaattaatatcaataatttttaaattttgtaaacacgtggctaatgtgccaataatatatttttctttacttggctctggaacaactataaaatcacttttttctattttaagtaaatcctcatcctctatattttctatttttttcttaatccagatagataatcctgtatcattattttttcttcgatcatttaacccatctataaatcttctaagatcattatttgcatgacttaaataaatacaataattaggttcattagaaggcagcttatgcactacttcctttacctttccaatagcttcaacgtcagacttaacttgtcctgaaataaccctatttttatcttcattcaacactttaaaatcatttttgttttctggttgaactcctacaaaacctggtgtcatatagttttgtaaaaatgcatccaaagttgcatagtcctgatattcaaagcccttagaagcagttactccaccttgtcctttatttggcaatatccatctctcctttatagtatttttatgaaaccattattgttaatttcgacacaacttttttctgttaaaataaatatttgctattttttcattatacataatctttacgtccaaaagcatatcaaaaataccgactatagtttaaattctctcctaaatcccacttaacttcaatcaatctacgatgaggcaccccagaatttcatttagcctagcgcacattatgaagccaagttccttactctgttccaacaactcacgcaaatccttttcagtctttacataagatgcattttcactcaaagcaacaaaatcatcaacaattttcttcaccatctcttgtcactcttcctcattattcatcgccattagtcttccttttaaaaaatctgcttcaactcaggaatctcttcaagtaatctatcacacccattaaccatattctttactattcaatgattgcggtcaaccttactatgaccaaatgtctccaaaacaaaaagccagcatttgcgctggccatctttgattataaaaggttgttcttcaatattatgcaacactacgttactgttaacttaacttttgtgccaatttcaaaatatacttgcgcagatcttccttggtttcaggatggttcaagccatattcaatcgaggtttcgagataaccttccttgttaccaacatcatgccgcttttccttgaacacatgggcaaatcgtcttgttcaatgtatcaattgcatcagtcaactgaacttctccacctcgaccgggcttggtttcagccaaaatatcaaaaatttctggcgttaataaataacgaccaatgatcactagatcacttggtgctttatcaatagctggcttttcaacaaaattcttcacattataaagactgtcgttgaccttgccatctggcgcaatgacaccatactttgaaacttccttgtgtgagaccttcattacagcaatgtagaagcatgagtctgctcatagtcattcatcaactgcttagttaatgggattttatcatccatgcagatcgtcgcctagcattacaacaaatggctcgcctgccacgaaactttttgctcgataaattgcatctcccagaccagccggatggggttgacgagtatagtacaaatttactcccaagtcagtaataccttgagtcagctttagcaattctaactttccagttttttcaagatcttgctctaattctggatttgagtcaaagtggttttcaatgacacgcttattctttccagtaacgatcaaaatatcttcaatcccagattttttagcctcttcaacaataaattgaatggttagtttaacatacaccagatgaaatatttgagatcgaatctatcaagcagcctaagtgttcaattcattattgcaattttcaatttttaatctttactattcaatatttaatttacgtctttaattggtggtattacaaatctattattcatatatgatggcttaaaatctaatttcttaaatttagtatcctctcttgagatcatttctcccatttcattaccagatacattgctattatttccgttaacaaaataatattgtgcatcttcaaacatatcctcttcttttgctcctttactaaactcacagaatcctaattcaccagctgaggttaaaaattttatgatcatattagtcagttttatttttgagctataatcattaggtattataaataattgctcattagacgaaaagcccgaatacgaataagtatctattacattttcgccgcaactatcagtataagtcagttttattgccaaattataaacaacattaggcgatatattaataatttgtattttagaatacttacttccattatcttgtaaaactttttttactatttgcgtatcatgtttacatgctaaagtaacgatttctttgtagttttttatagttgatgcggatttaacatcaaatctaggacgtttttcttcaatatcatttgcctttttaattttattttgatttttaacctgtgcaaaacctgctatcaccgcagcaatagtaccgaagccacctatccattcagcaacactgcctaatacctctccattagcattaatcattgcacctatcaatattccgaatcctaagcaaaaaagtgatactaatatcccatacacatatctatcatctatatttttttccttcttttgcattatttcatattcatccttttctcttttcctaggcatttcaataaatatcggttttgaaaaaatgtttccctcagagtcattatatataacaagtaaactatattcattgccaactaattttacttttcgaaactgtcaaatcttttgtgtaaatagatctttctcgtaaattgattttttaattatttatttaatcaaagtaggattctaaggtgtcctgaacctgaccaaagcctttatgaattcgattgaaataacggtcattgtagctcattgcctgaatgccaataaaagcatcaagcgactgttcagttggaaactctgccttaggcttagctttgcgcttgatcacattgttaaatgattcaatcatgttagtcgaataaattgaagctctgatctgcttgggatagttataaaagaccagcagatctggttctatgtctttcaagcttctgataacatggctgtaaaccttgccccatttggtatagaagtcatgcaggacagctgtggcttcttctttgtttgtctgttgatgcacctgtttgaattcgttcatgatcttttcacgatcgtcgacgcgtactttagcgcagatattgcgcatgacatgaaccaaacagcgttgaaaatgagctttaggataagtcctggccaaggctgttttcatgccaacaacaccatcagaaagaaaaagctcaacttgctttaagcctcgggatttcatgttttgaagcatatctgtccagacttcaatgttctcgctaggtgcaatgcagtagtcaatgacctccttgtgcccattaggcttgatgccaatggcaatatagactgcttcacgctcaaatgtttctcggcgcaaaggaaggtatgtcgcatccaaatagacgcagaaaaacttgtcgcttagcttgcgtttgtggtaagcctcaacctttggaatcatctgcttggaaatatttgatacctgagctggactgtaatggctgccatacatcttttcaattagatcggctatttccctggtggtcacgcccttggagtaaagcttgataatcatgctttccaagatatccgagtgctgcttgtagtcaggcagcgtgtgctgatgaaattgaccgttgcgatcccggggcacttgcacttcaattgggccaaattgcgtatcaactttgcggaaataagcaccatttctagagttgccagtattccagccatttctggcatagggatcatagcccagaaaggcggtcaattcagcttctaacaagttattaacagcctgttgtagctctttgcgcaataaatcatttattttgtctggattgaatagagcttgagcaaaatctttggtaaaatcattcatgaaggagttcttctttctgtatgtgtttttttgttcaaaccaatcatacgagaaaggaactcctttttctaatgtttaaagaaataaatttaaggaatcattcatccttacacaaactattttacagtctctacttttctactttttaaagctgttaaaatatctttaattcttatattatattctctacccaatgaatatggcttcacttgttcaggtactgaagctatagaaactttctctcttgacctggtcttatgaattggcataaaaacaatattatcttttggtacatcataagaatgcaatttattttcgtcattttgtaagcaaaagcctctaaattggattacttcttcagtattaccattccaaagagctgttagtttaaactcatcttttgaagagaaaacaattttttcagaattattaattacatttttagtaagtattttcacatctacaattggttcatgggataatctatttaaaactggtattaaagcaaagctcaataaacttattagaccatgatacattactgttgttctgggagaagaagatttatcagcagttaaaagcaaaaaactaaaaatactggctgctattattatacatgcactcattatattcactaattttgcaggatatctatttataaaaacagctaattttaccctataatctgataaaaagcacatacttaccattaaaacgacaatgataaaaatatatatcatatatccaggcgcctcaatttcagaagttaaaaataaatatacgttaattaaaatagctgtatatacagttgatatagctactataagtccattaactttattttgaaaaaagcttttcattcctgttctccaaaaaaatagccagctcatcagctgactacaaacttactttcccaacttctcccgaatcaacttcttagcctcatccacaataggcgctcttagcagcatcaccataacaccgacaacaccaacaataacttcgagtcccatcattagccaagaatctttcaagtgtgtattcatccaaaaaactggcaaaaacattactacaccagagaccaaatacttccataggctgttaaatagagtcctatagctcaacaaaccacgaaccgcaatcagttgatacaaagtaacactaatttcggacaaaacagttgaccacatggcaccattcaaaccataaaagtgaatcaacgggaaatttaaaattatgtttactacggcacccactgtaacagaaattgtaaattgcttctgatggtgaattggtaataggtactgcacgccaagtgcgttactccaagcaatcatcaaaatcacgatagactcaatcatcattgctggacctactggaccatagccgggaccataatattttggagctaatgttaaggagattgctgccaagccaaacatcattggtacagccatagccgatacaaaatcaaaagacttatacaacatctgatttaccttcttcatgtcaccatgtgataccgcattggctacatgtggcaacatgactgtaccagttgctgtcactaaagccaaaatcaacttcactaagctatcagaatattgatagtaaccagatgctgtttcattaaccatgacgcccaacatcgtacgattcaattgtacataaacttgagtagctatttgcggtatgaaaagctcaaccattggtaaaaagtgaatccaaggatttaaactcctaatcttaaccttaggcaaatctcgataaatatccggccacaaagttaagttacctagtagagttgacaatgccaatactacaatatataaagttacatcatagggtcccttgataaaaacgaagatcgctatcattgatacaatctttaccagtgagttctttaaaaccgttactttaaagttttcaacaccttcataaaaccaagaaatgtcaaaagccacagcaattagattaagcgactgagccaacatataatcaaactgtcgagtataaaaaataaggaagatttcaaaagcaataattgatacaagagtcattattgttttaactatttgaatctcccaaaaagttttggccattttagttcgattatctcgaacataggctatttgccgattcccataataaccaattcccatactagcaaataagataaagtattgaataatggaatttgtaaaagcattagcacctacaccttcaggtcgtaatacacgactgacatatgccgatgtaataagcggaactattattgctaatacttgataacctacattatagagataatttcgaatgaccttcatttaaaacctattcaccaaattcattatttaccgcatcgagtgcagcatcaattacctgatccatattgtaatacttgtattgaccaagacgaccaccaaagattaccttgtcttgtttctttgctaattcagcatatttagcgtacaaactattatttctatcattattcactgggtaatatggctcgtctccacgcttccaatccgctggatattcccgggtaataatcgtcttatctggatcacccttaccgaattcaaaatgcttgtgttcaattatacgagtgtaggggatttcagcttcagtatagttgatcactgcgttgccttgatagttgccaacattcttttcttcagtttcaaaacgaagtgaacgatattcaagttcacctaatttatagtcaaagaacttatcaatcataccggtgtagacaactttatcatagttattaagatactcttctttatcatcaaaaaaatcagtatttaatttaacttcaatatttggatgatcaagcatcttttccaccatttttgtgtaaccaccaataggaataccttggtaatcatcattgaagtaattgttatcgtaaatcaaacgcactggaagacgcttgataataaaagcaggcaattcagtacatggtctgccccactgcttttctgtataacccttgatcaacttttcatagatgtcacgtccaattaaagaaatagcttgttcctcaaggttttgtggttccttgcctgccatttcttgtcgttgttcattgatcttagccatagcttcttgcggagtccctactccccacatctcgctaaaagtattcatattaaatggcagattatacatacgtcctttatagttggcaacaggactattagtataacgattaaattcagcaaattgttgtacataattccaaacttctttgtttgaagtatgaaaaatgtgagcaccatattgatgaacctgaatcccatctacttctttagtataaatattacctgcaatatgatctcttttttcaattactgtaactttgtttccacgttttgctacttcatgagcaaatactgctccaaaaagaccagaaccaattattagataattattttccatcactattcaaaaaatctctttcaataaaatttctaaaatgtccagaccaagctttccaactggtaagactaaaataaacatttctactttcatcagaaagtctttcaaattctttatttctatatgctttttcaatacacttaccaaaatccccctctccgcgacaatggcagtgtatatccatttttatcatttttaaacaaaacattttgacttccgtatggcatccattttggatttacaggagcaatataacctacttttctacttttctatttttttagagtaacatacatttttgcagtaaagttagctgtttttctattcataaagaatttaaaaaacgttttttttatcatgctattttcaaaataagggactgtatttatctctatatcttgtaattcgtaaactgctgacattatattactccaatacttattattaaaaccattaatagacaccctcttatattctgccaatataagtcgtagttgcatataaagtctatacattaaaaaatcgacattattatcgacattattatcgacattattattgttgattatttcaaaagtttttttccacacggttaaataagaaactgtcaaatcttttgtgtaaatagttctttctcgtaaattgattttttaattatttatttaatcaaagtaggattctaaggtgtcctgaacctgaccaaagcctttatgaattcgattgaaataacggtcattgtagctcattgcctggatgccaataaatgcatcaagcgactgttcagttggaaactctgccttaggcttagctttgcgcttgatcacattgttaaatgattcaatcatgttagtcgaataaattgaagctctgatctgcttgggatagttataaaagaccagcagatctggttctatgtctttcaagcttctgataacatggctgtaaaccttgccccatttggtatagaagtcatgcaggacagctgtggcttcttctttgtttgtctgttgatgcacctgtttgaattcgttcatgatcttttcacgatcgtcgacgcgtactttagcgcagatattgcgcatgacatgaaccaaacagcgttgaaaatgagcttttggataagtctgagctaaggctgttttcatgccaacaacaccatcagaaagaaaaagctcaacttgctttaagcctcgggatttcatgttttgaagcatatctgtccagacttcaatgttctcgctaggcgcaatgcagtagtcaatgacctccttgtgcccattaggcttgatgccaatggcaatatagactgcttcacgctcaaatgtttctcggcgcaaaggaaggtatgtcgcatccaaatagacgcagaaaaacttgtcgcttagcttgcgtttgtggtaagcctcaacctttggaatcatctgcttggaaatatttgatacctgagctggactgtaatggctgccatacatcttttcaattagatcggctatttccctggtggtcacgcccttggagtaaagcttgataatcatgctttccaagatatccgagtgctgcttgtagtcaggcagcgtgtgctgatgaaattgaccgttgcgatcccgaggcacttgcacttcaattgggccaaattgcgtatcaactttgcggaaataagcaccatttctagagttgccagtattccagccatttctggcatagggatcatagcccagaaaggcagtcaattcagcttctagcaagttattaacagcctgttgtagttctttgcgcaataaatcatttattttgtctggattgaatagagcttgagcaaaatctttggtaaaatcattcatgaaggagttcttctttctgtatgtgttttttttgttcaaaccaatcatacgagaaaggaactcctttttctaatgtttaaagaaataaatttaaggaatcattcatccttacacaaactattttacagtctcttaaataatcattaattatagactttcttatatcagttgctgtatttcctggtctatcttgtaaataaaaagcgagggctttatcataatatgatactttcttcgctctagacaacgcaaccaaatataacaaaaaatccgtataactcacgtgtttagggaaactaacattttttagcaattgggttttataaagttttgcatgcggtgaaacttgaaaaaaagaaacatactaacctagtgttggatcatgaatcgacggattcacgatctggcactttttattttgtctaaaatagaaagtgaagataaagcaaatcaagtcttcagctttttagacacttgatgtcgtaaaagaaacggactgctttaccacctattcttaagtctcttcgaagtctgtgggcacttagatgccgtgtttagaaaattagaattaataggttgataaagaggtttatcttcacagcggaggttatattatggaatcacaaattattttcggtattgatgttagcagtaaatcttccacagtttgtgtggttaatgaccggatcaaacaaggcgaatcttttagaatctctaatgattcctttggctatcaaaaactttatgagcaactgaaccaatatttgataactcctttagttgttttcgaagctactggtgtttattctctaagcctgcaagctttcttagaggattatcatattaagtatttgaagcttaatccgcttaaagcgaaaaagctaatggacaataatttacgccataataaaactgataaggtagatgcttatcgcctggctttaattcaatttaatgccccgcaaaagctgcgtgatccacagcccagagagtatcatgaacttcagaatgccagtcgctattatgaagaacttactaggagtatagttactactaaaaatcaattgcaccgcaacctccaatccactttcccacaaattgaagaaatactgtctcatccatctggcagaatttattgggcgcttgttagtcttttcccacatgctggatatgttctagaaaagaatgagacacaggtaactcaaatgcttaattctatttctggaataggacaacaaagggcacggtacttaaccacaagattatacgcttttgctagagaagcttatccttatgattccaaagatagtattatcgttagagctattcaaaggaacatttctaatttattttcactccagcaagaacgcgactatgtaattaactacatggaaaagctggctaaagcagtaaacgctcgtgctttatccatctatttgagtatcccaggggttgctagaattacagcagtgagattagtagcagagcttggtgatctaagacggtttagcacttcagctcaaattgatgcgtttgttggcattgatccaggaaggtaccaatctggtgaaaaagacagttctcttggcattaccaagcatggcaatcatattgccagaaaaatactttatcgagttattactcaaatggagacggtaaaggctacgcagccttgccatataactgattattatgacaagaaaaaacgatcttcaaatagacaaggctataagaaaatcgccattgcatcagtccataaactgatacgcacaatgtttgctcttatcaaacatgatcaattatatgattacaacatagccaccgaaaataaaagactttagctgaaatcaaataatcaacttaagtataagcaacctatggaaaaactacaagtattcataggcttatttgtggtactttcgctttttcttaaatttaaactcttatttgctttaaccttattcgcatcattaaaacaagtaaatttattttcttaaatcattgataatacttgactttgggtagaaaaacagctgtatatcctgtgtttctgaatatacttttttaggttcaatactttctaaatatcctggtttcacagaacatttatgagcacttccatcatcagcatacacatcaaatcgatcccctactacaatatcagtgtcattatttttggcaaatgtataaagtacttctaaacaatcttcttccaaccaatcatcaggatcacacaccaaaaagtaatcagaattaatactatttatagctaactctaacgctgaaccatagccaccattttctttatcaattactttaattctattatctttcgcagcacattctttcgcatacttactagaattatctggcgatccatcattaatagccaaaacttcaaaattactgtatgtctgattttctaatgactcaaaacatttttttacgtatttttcaacattatacattggaacaattacggttatgtctgatttcattattttattaccccaaataaattttcttcaacttttcagcagtatttctaatatcgtatccttgtttttttaaaaaatttgtattttctgctcgatcatacttcctggatagtaactttaaactttgcttataccactctttaagcgataaatttaagtcaagaaacatcacgttatcagtaaccttaatatctagaggaacattagtggaagctaataccggaagcccagcatcctgagcctcaatacttgcaattcctagtccttcatattcagaaggaaaaataaataaatccattgcttgtagataatcttcaacattatctacatttcctattaattgaacatatttctctaatcgattttgcttaatactcattcgtattgatttttcctgtggaccagctcctataagtaacagcttagccttagtattatttttaataaaataacttaataattttattaaaaatatttgatttttctcaggtgatagccttccaacatgcccaattagtatttcatgatctgaaatattcaatttgttacgataatgttctctagtcccaatattatatgcatactgctgtatgttaattccatttttcaaaattcttccttttttgttaaaaattttttttgaaaattgccaatatgcagctttttttgttggagcaaccaaaacgtcagcatatttactaaagattggtgcataaatctttttaattacttcatgctttacatttttattttttcctgacatgtgcgaatgcacaataacttttttcacacctgcttttttagcatacaaggtaaataatgcaagtatagatatacttccactatttatatgcacaacatcatattgattatctagcagaatttttttatatgcatttacaacattaaatctattctttccaacattaaaaggtaaattaaaagagtatagcgtagaatttagtgatttaataaagctaatatagtcgggattatcagcataatatggtgttaaaaaatcgaattttagaccttttttgttcatattttcaattgttctaaatacaaaagcctcttgcccgccatacaaaattggctcaccaaacgcctctaaaatctttttcatactatccaactttctacatttttattttatatactctatagacggattaaaacgtaatccctcaattgttcctttaaatatcatctttaaccttttacgtttattatttttagctttgaacaaaacccttatcatgtgatcatttaaacgtaaaaattcatatccatatccttttagcccttcctttctataaaagaaaaaatcattcctatacaaatatctatatctttctattctttctgggacatctgttgcaatgtttgcaccaacattagtttttgttttatgtacaacaatactattagttacaacataacattcatattttgaggaaattcgtcttgtatattcccaatcatcagtccaaataaagaattccttaattggtaaccctacttttttgataactgaaactggaacaaataaggaaacaaaagaagctaaagtaacaggtatcaattcagatgaaaaatcagacacattttttgttaatgtccttctctgaatattcatcgtacacaaggtattatcggtccacaaagttttactagacaaaaaaccataatcatgatttagttttatatctgccttaagaaactcattcaaagcatttttagttggtatgcaatcatcatccataatccaaacaaaatcataatccttttgagctaccatctttataccatactgaaatccaccagcaccaccaagatttttccccgtattaacatagtttatactgttatcatcaatatattttgcaatataattaactgtaccatctgtactattattatcaataatatatatatctggctttgcggtttgttccaataagcttttaatacattcttttagtaacttttttctattatatgttactacaatagcggcaacttgctgtttcctcataaactttaattctcctttttattcataaagctaactacagaaataaaacttaataaaaatggtactattagaaatctaaatggatcatacatattttgtgacattatactagttaatgcagtagtgcaagttagtaaaaacaaaaacttattttgaacaaatttgactttttttaagcttacatataatcccattacaaatggcgatataaaaatagcaaaacctattattccatattgaaataacatagataatatacctaaatctgattggtttaccatatgtgtatccaatatattaaaataattcccatcgtttgatataccatatccccaccatacacctctttctatccaaagagtttgatatgtatttaatgtcatcattcttatttgagtactagatccatagtctgcatttgaagttgaaaaagtattaaccaatttatttaagtaatttcctctaaaaataattggactaatggctatagctcctaccacatctagagctttacttttaaaagtatcactaacgataagtatgaataccactaaacttaataaataggctatttgttgtgaacgtgagtcatacacaatatatgcatataaaaagcataatactataactgagatattacgtgttttaattacaacacttttttctttgatgattttgaaaagagccataacccatacgtaattatctaaaaaagtacctggtaatctacttactccatttctcgcccaagcaaatcccattacttcaaaataacctggagctacattcatacgtaatttattgtacaaaaaccacgcgctaaatctaaatattaatatagcaacccccatataatatatattattaataaatttcattcttcgtttagcagtcgctagcacctccgtcatcggaaacgttaacaacatatacgcataatatctattatgaattaaagcatctttaattgtgtacccagataaggaaaaactatttagcctatataactgtagcccaaacataaaaataaaaacgcctatataaatagatacatatctgagactgtaaaatagtttgtgtaaggatgaatgattccttaaatttatttctttaaacattagaaaaaggagttcctttctcgtatgattggtttgaacaaaaaaaacacatacagaaagaagaactccttcatgaatgattttaccaaagattttgctcaagctctattcaatccagacaaaataaatgatttattgcgcaaagaactacaacaggctgttaataacttgctagaagctgaattgactgcctttctgggctatgatccctatgccagaaatggctggaatactggcaactctagaaatggtgcttatttccgcaaagttgatacgcaatttggcccaattgaagtgcaagtgcctcgggatcgcaacggtcaatttcatcagcacacgctgcctgactacaagcagcactcggatatcttggaaagcatgattatcaagctttactccaagggcgtgaccaccagggaaatagccgatctaattgaaaagatgtatggcagccattacagtccagctcaggtatcaaatatttccaagcagatgattccaaaggttgaggcttaccacaaacgcaagctaagcgacaagtttttctgcgtctatttggatgcgacataccttcctttgcgccgagaaacgtttgagcgtgaagcagtctatattgccattggcattaaacctaatggacataaggaagtcattgactactgcattgctcctagtgagaacattgaagtctggacagagatgcttcaaaacatgaagtccagaggcttgaagcaagttgaactctttctttctgatggtgttgttggcatgaaaacagccttggccaggacttatcctaaagctcattttcaacgctgtttggttcatgtcatgcgcaatatctgcgctaaagtacgcgtcgacgatcgtgaaaagatcatgaacgaattcaaacaggtgcatcaacagacaaacaaagaagaagccacagctgtcctgcatgacttctataccaaatggggcaaggtttacagccatgttatcagaagcttgaaagacatagaaccagatctgctggtcttttataactatcccaagcagatcagagcttcaatttattcgactaacatgattgaatcatttaacaatgtgatcaagcgcaaagctaagcctaaggcagagtttccaactgaacagtcgcttgatgcttttattggtattcaggcaatgagctacaatgaccgttatttcaatcgaattcataaaggctttggtcaggttcaggacaccttagaatcctactttgattaaataaataattaaaaaatcaatttacgagaaagaactatttacacaaaagatttgacagtttcacatatcttgaaacttttatttctctatttttttgatttacataaataaaatacagtaaaacagatataacaacacctatactaatacttaaagaatttaagtctttaaaaaagttgataaaacctaaatataaaaaaactataaggtaaattgaatattcatacagttttactgttttccatctcatattttttctcataccaaattaaaaatgtgttttcgtttttatacctatttttcgtttaattaaagaaaagcctttctttaaagtattctttccaccaatttgtccccaaggaacttctacataagtaaatgaattggtaccaagccaaacatccattaacaactcagaaatatatccaaatactctcgcttcttgcacagaatattcagaaatattaatgctattttctagcttacttagaacatcaaacatgaagctacaatatgattcaaatgcattccttttcataataaacatattaaacatatgagccccacgctttttcataactttatcaaaagcaggaagataatttggatatacttcagcaattacctttcttgcttcatccaaaggctctttatgatgtgcatgaatgtaatgtgaataattagtttcaatataataatttctttttttaggtaaaattacatcatatttttgtaaaagctgatttactttctcaatactaattacattatctaaagaatatggtcttttctcaaagagtaatcttctatagtgaactaatccaatagcgtcaacatcttttaaattcttccaagcccaataaacagcagttagttcattgtaattaggatttttagaggatatattttcaccatcatcatcacgctgataggaaatacctggtttataattctttactgcgcctactaatactggtaaatatccttcctttttgggcataggaaactctttatgcgcagcaaccaaaatttctattttcaaagactcttctcctgatcaatacgctccattaggatgaataaccaccccaattgtcttaacaatcaacttcaaatcttcccacaaaccggaatggttgatatacacaatatcaagccaaaccatttcgtcaaagtcagcttcactacggcgtgttacctgccacaagccagtacaacctggcataacgagcaaacgttgcttatcgtagtcagtatactcagctacttcagagggtagagggggccgtggaccgactagtgacatatcgccgatcaagacattccacagttgtggcaattcatcaagactatacttgcgaattgtatgtccgatcttcgtaattcttggatcgtccttgatcttgaacattgcgccgtcaatttcgttctgatcttctagttcatcaagcatttgatcagcgttaacgaccattgaacggaacttccacatcttgaacggcttctcatctttaccgattcgttcttgagaataaaatgcaggaccaccatcttcatgtcttatttttattatcaaaaataaaaataacggagatagtaaaattaacccaagtgcgctagctagtatatcaaatatccccttaatcgtgtgatacactggtcgtccgttaacttttgcaggattaacttgtagtttatcatactcctcttaccctctgtttgatttagtctatttgaatacactctcttattaatcttatcacgtttaacgcaacttagaagcaaacttgcatatttgcaccaagcattaaaataaccagaactttttcttctgcttcaatgggtgccaatccatctgaactgggtcgccattgatgatacttctagcattatcttgccactgctgagctagatcttgactgaattcttgactcatctttttataagcttcactcaattgatactgccgtcttggcaagtcgtgtgcgtcgctagcaaaggtgcatccctgccccgtcgcaatcaacttacgcgacatctcttcgattttcttgccaaagattcctgtataagagctagcagtaatttgcaccaagcagccttgttccagcatcccttgcaaaatttccggttccttcaagatgcgactattgcgctctgggtgtacgataatcggcgtcaccccgcgctgcatgatcttgaagatcgtgtcttgcgcataagttggcacgtcctcacttggaaattccaacagcatataagtaccgtcttcatcgcagaacaggatatcatcgttatcaagcgcatcaattaagtcacccgacaagcgaacttcctgccctgggaaaaccgtcaacggcaccttggcctcatctagcttctgttggtagagatcagtcagccagacgatatcatccttatggttagtgtaacgaccattcagtgtatgcggcgtacaaattgcatgcgttacgccatctttgaccgcagccttggctaacttaattgaagtgtcccaattttttgagccatcatcaatgccaggcaagatgtggcagtgaatatcgactaaaaccattattgatcgtcactcttttttctaccgaacaggccctttttcttctcagcgccatatccataaccatagccatacccgtagccgtaaccatagccaccgttttcagctctaatgtcgttcatgacgtagcctagaatccgagctttggcaaattttaacatttgcactgctctagtaatcccagccttttgcgtaacgccttgacgtactactaagactacgccgtcaaggtgactagccaactcttgcgtatcggatacttcaagaacaggagctaagtcaatgataaccatatcataatgtgacttaaccaattcaatgaaggtttccattctgcgtgaaccaatcaattcagctgggtttggtggaatcggaccagaagtcaagattgacaagttatcaattccactttcttcaaccacatcatttaaattgattgcgtcagcttctgaagtaagaacagttgtcaaaccagtattgttcttaacgttgaacgtactgtgcaaagttggacgacgcaagtcggcatcgattagcaaggtcttgcgacctgcttgtgcataggtgatcgctacgttggccgtaacggttgacttaccttcactgatgttagctgaagtaaaagctaaggtactaatttcttcatcaactgccataaagttgatgttagtccggatagttctgaattgttcagataccgcactacgaggatcagcaactgtgattaatttggcaccatgcttaattgtatcgtcggtaccacgcttttttctaaataatgccatttacttctcctctcctatactcgacggcttctacgcttagggccattagaattcttattcttttttctaatgacaaatgatgatgacacatggaagtgtgaaacttgacctaagtcaactaaacctaagttatcagtcaagaatgcatcatccttaactgtagtgtcggacatttcacgaattaagactactgcgaaacttaaaaccaagccaataacaaagccagccaaggtaaagagtttcacattaggtgatgattgattaccatcagttgctggcgcaacgatcgtaacgttgttaatgttcatgatgttaggaatttgatctctgaatgaacgcgctacagcgttagcttcaacctttgccttttcaggtgtatctgcagtagcagaaattgagaagacctgtgattgttgttgagtattaactgaaacgctcttggctaattcgctagtagaaacgctgtaactcttaccgctacgttcaactacttctggttgagcctttcttactaatactcggcgaccctctgcattagtcttgtacttagcaggtttagcctttttaaccactctaactgggttagctaaacgattagaagcatcttgcaaaataacatgactagttacaatatccttataggtagtaaccatttgcatgttggcttgttgagtattatatgccgcattcgggtcattcttgttagccttttggttaaccaagatctgtgcattagaagtatactttggtgaaataataaaattagcgacgccccagccgactaaagccaaaccaacactccagataatcagtgcccagatgtggcgacggcaaatttgtagcaattgagtaagatcaattgtattttcagtttgcttttgctcttgttccatttaccttttcctttaataacgattaacgattcataatatagctagccttgttagcagctaccttaacatgtggcaattctagcgccgttctgatcttatcagaaactcgttgacgctcttctctacttaccacttcaatttccatagtgccaaacttagggttttgcgtttctttacttacaccctgagcatgatcttgagaaagattgttagtggcttttctataatccatagcaatcttgtacatttgattcatagtcaagtcagtctgcatctcgctagaaatggaattcaagaaacttgaattaagcaaagttgaaggtgaaacagacttcttaagcaaggccataattaccaagcggtcacgctcttgtctaccataatcctgacgagggtcaccatgacgaagttgggcaaatgctaaagcctttttaccattcatgtgataagtctggcctttgacaaagctataacccatattgttgaaagttaatggagaagttacatcaatccccccaacttggtcaattgccttcttcaaaccacccatattgatcatgatgtagccgtcaattggaacactgtaatatttatcaagtgtcttaatagtttcactaactccacccaatgtataagctgagttgatcttggttacaccatattgtgggtaatctgggaagattgcatttgagtcacgtggaattgaaacaatgcttgtactattagtcttagggttgattgacatcatcatgatggtatcagttctacccttccagtgacgacccatggcaccagtatctgtacccaataacaggatattaattggctttttctcattcagtaaattatcaagagtacgtcctttattactcttggtagtcttagcaacgggagtgtacatattctgcgtcgtatcacgcaaatttttgtagatcatcccgcaaacaaaaagaccgactacaatgatcacgccaataataatccaaaaaccgcgccagaacttacggtgacgacggtggtgatgatggcgatgacaatgtatcggtttattacttgattctgcgttattttccattctaatcctcttaatcttataatcgttattattatatactcaagaacccattttgaccacccttaaaaggtttacatgcggcaaatacttaaaaggaggctcgttttattgctgttttgggttgctgaaataatatattttggtagatgtctaacatgtaataaaaaatgcatccctcgaaaaatggaatgcattgctgctagattgagtttaaacggaattatttttcatcttactatcgccttgccttaaattgtactcacactgtaccatatttagtaagacctaaataaccaaaaagtattaagaagtacattaaatagaagttggatagcatgttaagtattgaagaatcaatcaaagaatttgaaacatattttcagggtaaaccaaatgaagttgaagtagtatcacgaactataaaacaaaaaagtagacggccacataaaccgcctactttatcctaattgttatgatgatcacttgagttagttaaatcatcatttttagttagatcatctatatttccaactactccaccaaatagtgtaaacacacctattccaccaaaaatactaccagccaccgaatgcctttgcatcaccaaaaaagcagaaatacaaatacatagaattgttactattgatactactatcagagatgtccatgcgagccaacctcttcttttttgactagcaacttctaatctccgtctatgcctactttcttcaacaccattattaaattatttccttagcagcattcggatacaatttttggtatccctcaagaatatcaggaagcggaattggtccactatgcatctcaagataagccattatttcttttttggtttctttaggcatctcagatttttgaatttgatcaagaatctattcatctagcgaatctttatctgactttttctttatatcattttctagctttttacttggcttttgatctgccataagatattattccctttcttaagtcgtcccctatcctttgccaatcactggcaatagctttttcctcagcattactattactagaatatatcaacttgtttaataatttgacataaggcatagctacatttttcgataattttttaaacactaattgaatatcggtaaacataattctcacctcattcataatctctttctttattaaaagtatacttaaaatttgactcgtggtaaagattattcttctacatgcgatccacttctttccttattataagcatctgtaatacaataaacttaacagcaaataacgaggtgtttttatgattgataatcaacctaaaaagacaaaagcttatatcgcgggcgtaaacttaaacgaccaaaacttcgactactacatgaccgagctggccaacttgactgaagccaacaacatggaagtagttgggcaaagctttcaaaatgcagaatcaattgtcgccggaacttacttcggtgtcggcaaaatcaatgaaattagaactatggctcaaggcttaaaagcaaaagttttagtccttaatgacaaattgactcccgtacaaattcgcaacttagaaaaattaaccaaaatgcgagttattgaccgcacggaattaattctggaaatttttgccagccgcgctcgaactaaacaagctaaattacaagtgcaactggcacgtttacaatatgaattgccgcgtctccatccctccgagaacaacttggaccagcagcgtggtggtggcttcgctaaccgtggtgccggtgaaagtaaactagaattgaaccggcggacaattggcaagcaaatttcggctatcaagaaggaattgaaggctgttgccggccaggaagaaatcaaagcggcacgacgcaaccaaagtcgcatccctaaagtcgctctcgttggctacaccaatgccggtaaatcaaccacaatgaacggactattgcgtgaattttctaaagaaggagccgacaaggaagtcttcgttaaaaacatgctttttgctacgctagatacttccgtgcggcggatcaacttgaaagacaactttagcttcattctgtctgacactgtcggtttcatttctaaactgccccacaacttggttgaatccttcaaggctaccctgcaagaaacgcgtgatgctgatttattaatcaacgttgttgacgcctctgacccgaacatggtccaaatgattcggacaacacagaacgttttggatgaaattggcgttaaggaaattccgatgattaccgcctacaacaaggctgataagactgatcgcaattacccacagatcgaaggcgacgacattctttattccgccatcgatccaaaatcgatcaaactactggccaacttgatcaccaagcgcgtttttgccaactataaaaagtttgacttgatcctgccactaagcgcaggcaaggaactggcttacctgcatgatcgcgcccaagttttacgtgaagactaccaagacgatggcgtccacatcgaagcgaacatcgcgcccgacgaccaaggacgctttcgtcaatatttggcctaactcgattaggaaaaaatatgaaaaaacataatctgctgttcctttttgccctcacatttttgttagttcctactaacacgcctgtaatggctgctaaatatagtgctagtgagtcaaaaaaggtgcgcacttttcaaaaaagctatcatcgtttgagccagaagaattacaatcagactacgctctttaccgtgcagccaaattttggtattcctttttcagcaggagtgcttgaccctgattacatcaaaacttcaatggcttatgtcaattattaccgctcattggttggactgcctgatgacgccaattatgctaatgataacgttaacgcacaacttggtgctgcagcgctagcttcagttaacgcggagcaaaatctgcgagcccatggtttacaaggttacgtcaagcctggctatatcagtgatactgactgggatacagcggaaaatactacattgggcaatatcaatttttcagaatcaactagcggaaccacggctggcgagatcgttaccgatctgatacgtgaagataataatattgcaggtaatggcaacatcggtcaccgcggcatgatcctctcgacgcgagccacccgaatgggaatcggcgcagcttatggcaccgaaaacaacgtcttgtattctgttgaacatggactatttgccgatgatattttgcgccagcctgtaaaaagccgaatcgtttatccagctgccggcgtttttccttacgaattagttggtggtaaaacgccatggtcttactcaacaaccgagcgaatttctggtcagccgaaaatttacatcacggatttgaccaccaagaaaaagcggcaagcgacgcaggtgcgcaacttcggcactgctctttatggtgacggctacacaacgacaatcacttaccgacctggcaaaaccaagttgatcagcacgcacaagtaccgtgtgcaaatcggcaaacattatagctacagtttcaaatttttcaggcaaaatagcacattgaaaaataaacagattgtaaagcatcgaaaatgaaatacgttgatatgcaaaacggctcaagcagttgtacatcctgcttgagccgttttagatagtaacaaatattgtagtctgttcaacaatcttcatgtaaaataatactcaggtctattgcagcggttagctaccgctaagacttagtaattttagcatggctacacacccctcaagattttttaagttacggaggtggaagcatgcataattgggtagactggagaagtaggcttacaaatgattgcttgggctattgcgtatgcgataacaaaaaaagctaatcacaaggattagccgaaacaacagtcatcttaagttacgattggagttagcgaccgacactcgctagctccttttcttttattattttaatatgatttagaatttattgcaatgtttagaagtgcttattctacgccaatgacgtaacgcatgatgaatcaatagcttgttgtaccaagcataattgtgcttcatataattataggcggtggcaaagttatccaattgtcccgccgcgataaattgattgcgtgtccaatgccaatcctgagtaggataatacaaaattttcactcggattacccttcctactgtaataattgcccgatcatgatgataacgcgtgcgagcaacattgaggtagctaccaattaaagtattgcgccagtatcgattatgcagataatttttctcccaaagtaaggccttgcgcaataccttagaaatgcagtaccattcgcgtttgccgttaggcaattcaaccaaacaccaaagatattggtgtctcttcgccattcaatccaccccttctaattaatatcggctttaattataccgctactagctattcagttagaaaatcaataatgtcagaaaatattaggtcatgatgtcaaatctattcaactgacatcatttgtcctaagaacgcatttaccgcttgcttaatatactcgctgcaaaggtgagtatactgcgttgaatttctggacatggctctgcttaaacggtcttgatgggtgtcattttaatccttctttaatttttactataattttctccacactgaaaactatggcaaaaaaagtagaatttttcagtctagggaaaacttttatcaatacaaaaaagcaagcgcattaatcgcctgcctaaaagtattccaaattacttctctatagtactctcttagcaattgatggtgtaaagtaactcgataccgtttgcaaaatagtaccttgctctggtgttgctgcatttacatattgattgtttcctacataaattgcaacgtggtatggagctgtcgttgaaccccagaagactaagtcacctggctgcaagttgttcaatgaaacagtttgaccaaccttaacttgatcataagttgttcttggtaagttcacgccagccgctttttggtaaacatattgtactaagccagaacagtcaaatgaatccggaccttctgcaccccagacatagttcttacctatctgttgtttagctagcgcaacaattgaagcggccttactagtagcttgcgttgaagaagtttggttagtattttggctagtcttcttgattgccgtattaacaatttgcttagccttcttcaccttagctatcttttcagccttcttctgagtagccgttttagtagctactgccgctgtcttcttattaacagtagtctttgtctgcttagcttccgttttcttaacagttggtgcttgcgatacttctgctttttctccagcagtaacatctacggtataacgcgcttcaatccattcacgcgttccaaccttgtaccacaagttgcccttcttatcgagtgcagtctcagctacattccagaccgtgccgtccttagcacggtagcccatgaattgaccattctcatagttggtccaaatattcaggctcttacctggtaaatagctaatcttaacttgcttaatcgcagtaaaattagctgcacgaacagttttcattgatgtgattgcggaaacacccgtaacggtcagggctgcagccgctcccactttaaaaaaattatgtttcataattgaatccccttggtagcgaaacaggtgaaaacttttcacctaaaattacccactcttactatgtaacgccttcattattgcatgtcctacctcaagaagcaaattagaacattacaatattacaaaaaagacggatcactggaatccgtcttcattacttactatcttaatttaaaacacgcttagcaacacttgggtagaagtatgaactcaaagtttgcttgattacgccttgacctggtgtagcagcgtggatgtattggttgttaccaacatagatacctacgtgatatggagcacttgcactaccccagaaaagcaaatcacccggttgaagattatccatagaaacggttgatccttgcttaacttgatcataagtagttctacccaacttcacgccagcagcgttagagtaaacatattgtaccaaacctgaacagtcaaaaccgttagttcctgtaccaccccaaacataggacttgcctaattgtgctgaagccaaagtaataactgctgaagcatcaccagttgcttgaactgacttcttagcctttttagctttcttaactgcttgagccttatctgaactagcatcaacagtatattgagctaaaatccattggttatcaccaatttggtaccatgtacggcccttcttatcagtcttggtgtcaaaaacattccaagtagtaccatgttgagcacgttgaccagtaaagtggccaccattgtagttgtcccatatgttaattccataacctgcaatgtagttaatctttactttggtagtagcagcttgaacagtagcattagttgaatctggcttgatgacatttactgcagctacaccggtcagagttaatgcagcagctgcggtaacttttacgaaattgctcttaatattcatcaaattctcctgtatgttttcactatatctataagcattcttagaatttattacttaagctggtaacgaaaatattaattcatcgaaaaatctttaaatttctttaatgtatttaacaaaatctataataatgccccaatgttacagtagtgttacaaaagtaatactgatttaataaatattacgtttccgtcaaaaagaaaaatagctagggagatttccctaactatcttaactagatatcttatttttaggaagactaacgcaattagtcgattacacgcttagctgatgatgggtaaaatgaagctaaggtttgttgcttaacattttgaccaggagctggagcgtgaacaaacttaccgttacctacgtagatacctacatggtagttaccccagaataataagtcacccttcttaagcttcttagttgaaactgaaatggtcttaccaagagtaatttgaccgtaagtagttcttggcaaaattttgttaattgcattcttgtaaacgtagctagttaaacctgagcagtcaaaaccgctaggacctgcagcaccgtaaatgtaaggcttgccgatttgcttcttaacaagcttaacaaccgcattacgctccttagtagtagctgattccttcttaactgaacttgaatcaggattggtagtttcaagatctgaaattgagttgttagtattgatagtagtgcttgaaacatcatcagcgtgaacagctggaacattgatcattgaaataccggcaaagaatactgataaagctgcggtgtattttactaaagtacgtctaaaattcaaaattaattgtctcctctaaaaattactaaatttgtttttgatttcttaaatcagttgacggtttatataataccgactgaatgttacacgaatgtttcaaaagagctaccatcgcgttaagaaacatgttaaaaaaacagattttatgtaaaaaaaggagaagcaaaatgctagcgaagctttgctacaagggcatcgagcgcgtttttagtttctgttaaattgtcgttaactaagatatgagcgtattgcttcaaatcttcaggtaaagcatttaattcactgccgctaagtctttctttaatcttggatggatcatcgccccgctttaaaaggcgctgttttaactcttctttagtagaagttgtaacataaagaaaataagccttgtcacctagctgtttaatgtaggaataaatgcccttgatatcgacaattaatgaaaccagatcactttttttccaggccagattcaaagcttctcgacttgagccatattgataagagccgtacttaatatgctcaaaaaagtgcagctgggcaaaagtttcatcggtttcaaaatgataagaaacattctgctcctcgcctgatcgcatcggccgcgtggtatgcgttaatacgcgtggaataccatatttttcagttaaatattctgaaacagtcgtcttgccagcaccactaggtcctgcaataagaattatttttttcaaaacctgattctccccacttgaaaatgttgcttttttataatagcattcttgtgttataaaagactaagactttttctcggaaggaagatacacataatgaaaaaagcagacgtaaaagttggtgcaatcgttggtgccaagtcagaagaagaacttaagaagccattccaaggcaaagttgaaaagatctacgaaaattccgcattgcttgcaattacttcatacgatcccgttgacaccactgctatcagcgacttgaacaataagatcgtagttaacttcaagaatttaaagactgctcgcgctgccaagaacagcaagactgcttcaactaatgaagttaagattgaaaaaattgccaagaagaacgacgataaaaaagaagcagacaagaagtaaaatttgacaaaaatagcccgcgcaatgtttacgcgagctatttttttgcctaaaattaggacatcgatacgagaggaaatattttatgaaagaaaaaacgcgaactgttttattttggtttattttaatccagccctttttagacctttattggttctacaacggtaaattagcggaagttttaccatttactctacctacgattatccgaattttagctgtttttgtgattttctgtatgtttttcagtcaaaagcaaaattggcaaaaattagggcaagacaagtggttaattctatatttagccctactaattttgtattcgattattcacttaatccacgtcaaaaactttaacagcattaatcctaatgactacaattattcaaccgtaagcgaaattttttatctcattagaatgcttttacctctgatggtgatcttttttacaaaagaattgaatttcagtcaggagcaattcagacacgttatcgaaggcatcagcggacttttttcatttacaattgtcattaccaatctttttgtcatttcgcttagaagctacgagacaggcccgattagcgctaatatttttgaatggtttgttaaccccaatatcggttactcccatatggcctccaaaggcttcttcaattttgccaacatggtatcagccgtactctttatgctggtgcctctgatgctttacttcatgttcagtcgttttaactggaaaatcgtcactttgaacgtagttcaagctttagcgatgatcgagttaggaaccaaagtggccctcatcggtttaatcggtggcgtgattatcagtattttgctgtatgttttccacttatttattgttaaggatgttaacaaaaacggcaaagccattatcgtggcgcttttaatcgaagcgggcacctttgccatcatcccctttggtccagcaatccagcgctataattatgaaaaatatttggctcagcaatccgatgattctttgacacaggccaagcgagaattaaatgctggcttaaaaaaatatcctcaaggtaaacagcgcaaggaatttttaacgaatttcatcggcaatcattatcaagattacgccttaaataagaagtttgtttttaaaagctacccttataaatacgatcctgaattttggctcaaaatcatgaacgagccaggcaccgctagaatgcaaaatcgacatgtagaaaaagcgatgcttgatcaagttgtgaagactaacaataatcgactcgacaagttcctgggcatttcttacacacgagaaaccaacattttcaaccttgaacgtgatttcactagtcaaatttattcacttggttggatcggcatgctgttgttcattgggccttatgtcattatcctgctctacgctttaattaagtggctaatgaacaaagaaaagcggacttatttgatcagctcaatgttgctttcaatcgcctttatgattttcgcagcattctcgtcaggtaacgtaatggacttcttaacagctagcttcatcctggctttcgttgaaggcagcttgttagctagcgtaaccagaaaagaaaattaaacataaaaaaagttaggtagttgcttgcctaactttttcttagtttttaaacattatttttcttgcttaataaagcttgaatctggcacccgaattaagtagtaccgagttgctaaatgacctgcatgcatcccgattccattttgccaattccgcttgtacttagccgtataaattgccacgtaagcacgttgatactttttatccattttagccaattccttttttacataaggaatcttctccgcattcacgtcaagcgcagtgttaccataagcaatcgaagcatagtcactaccaatcgtgaccttgctgccatcgcgataaaaagtataagtttgtgagccatatctcttcttagcagaattaatcgttacatagcttgaatttcccgcacctgtacgcattatcagtggctcatacttcacgcttgaagtaatgcggtttgcatcttccaggtctggattgtccataaaagtctgattaaacatccaacctgcagctaataaaagtactacaatttccacaatattaagagccatattcggccaactaaagcgtttatgctgtttgataatcatcttaatccgtctttgacggatgttctggacgatgaaaactaaataaagaatgatggcaacccaaatcaggatcccaatgatattccagctgaacatatctcgccctgctatataaaacatagaaacatgcagaagttttcatatttctacatgtcagaaagaaatatattttcctttctttgtcttatttactgctgtcttcatcagtattccgatattccatctggggagtaatcgcattgactaactcttgcagcttaagggcttagccagcccattgtttttattttgttaacgctagtaaatttaatactgcattgtcatcacgatcattgctatagccacattcataacaaatgtattcattatgcttggtgccatgttttttattgccctgcagagtaattttgtctgcaccagttttgacatagccacaattggcacatctttgtgttgatggatatgttttatcagctagaattaattctttgccataccattcacacttgtaagtcaagacttgtctaaacttgccaaatagtgacctttgcatgcctttggaggctacatgggtcatcatcatttgtttgacattcaagtcttcaatgacgatttggtcataattgtttacatgctcagtggtaaatttttgcaaaagatcattctgaatattggctgctttgcgataatcacgctgaagcttggttctcacttgcaggtaattattgctttggcttgccgatttaccgttaactcttctctttttagacaatactctttgataatgcttgattcgcttgtacagtttctgtagttttgctggcaaaacattaatcttgccttcagtgtagttgaaatgcccaacgttgacatcgatggcggtctttttgccagttttagcctttagtccagcctcttcttcataggaaagggcagcgtaataatgtcctctttctctaaagatgctggcaattttaacctcttccatctttaatgcctcgtatgctggaatatcaaaccaagatttaatccctctaggcttatctaatctaagcttgccattaattatcttggcgcgatcagttttaaagccttgacgtggagctttcttagatttgaaatgcggcttgccccaatcaggctgggtcttgtcaaagaagttcttccaagcattagccagatccttgactgctaattgcagacagcgagcagacaaagcaaattgccaatcagccttgttattgactaattcatcccacactcgatgctcattaggactaggattattatccttgtctaaagtccaagcttcatacatgtcttgccaggttgctaaagctagattccagcagtatctgcgatagttacaaagacgttcaagttctctttgcattatcttatttggccttaattcgactacctgagttttgatcatttgtttcacctccaatgcaaacataagtttagcaaaggatgtaacaaaaacaagcgaacaaaatattaaatttttagcagcagttaatttgcttctatgttttgcctttctgaacaaattacctgtatctttttctatattgccattaaattctatatttcagctaaccatttaatcctcctttttttcaattatatggtaaaaaaagcaaaatttgaataggataataattgaatacttagttaaatagtgagaagatcttactagtacattagatttattagggaacattatggtagcaatagctttttattcaattactgggcaaacggaacgttttattaagaaaactcaactttcggcccatcaaatcgacgatgccaaccctaagtatgatatgggaaaatcttatatcttaatcgtaccctcatatcaggacttcatgatggattcagtcgttgattttttaacgtataaagataacaaaaaaaatattatagggattatcggttgtggcaaccgaaactttaacgacctctttgctcaaactgccaaaaagatcacggcaacattgaaagtgcctattttgtatcttttggaatttagtggtactaaccaagatgtcaaaaatgtacgaaaaatcgtacacgatctttctgctggtgagagtactaagcaagtccaaaagcctaaggaattacgtgggaatatcagctttttgagtgattttagagattaaatatgactgaaaaatattacaaagcaattaactggaatgacatggaggaccgggttgacaaatctgcttggtcccgcctgaatgatattatctgggaaccccgtaatgttccagttagagaagataaaaaagaatttttacaattagacaagccggtgcaagatgccttgcttcacgcattcggagcactatctttttcatctggactccaaatgaaaaatgggctagagcaaattaaggtagatgccatcacaccagaggaagcagctgtgctgaatgccttgcaatatttggaatctattgccaataaaggctacagctacgttatcaacgagttgacggactcaaatatagcaaaagacgttattaactgggctgatgacaatccttacctgcaaaagaagattcggattttgaataaaatctaccaaggcggggatgcactacaaaagaaggtagctaacgttatcctagagacagctctctatcattctgccttctacgctccgctttatttattcggacaaggcaaaatggtacgaacagctgaaattgttaagttagctttacgtggcacttcatttagtgggatttatcctggttacaagttccgcttaggctaccaaaaattaggtaaaactgagcaagcagagctaaaagaatggatcgataacttgtacgatgtgctaattgataatgagaagaagcacattgagttaatgtacaagggcactgactggatcgatgatgttacgcactatctctactacagtgtcaacaaggcctacctcaacctaggtttttcagccaagtatcctgacacttctgattcaatcaaccctattattgaaaaaggggtcatcaagaatgcagtgcttgaagacttcttcttctacactaacgatcactcgctgactaagtttaaagaaattaaataattacaaaagtgtctgggaaaaaactaagtctcagatcatgaaaaaagaacgttgaatttttgtttcaacgctctttttgtatacttttagctccagccttgatattattaaatcatcacaaaataaaaaaggtggaaactaacatgtacaagaattatatcacaggtcaaactgctttaacacttaatctagattttgccattccggccaatcatttggctaatgtcatcagctggtttgtagattcaattccagaagatgttttagtaggcaagactgctaaaacgggccgcccagcctatcatccagccatgatgctcaaaatactgctttttgcttactccagaagagttttttctggcagaaagattgagttgatgctggaagaaaatctgccaatgatgatcttggctgaccagcaaaagatttcatatcatactatcaataattttagatcaagcagccatgccaatgaactgattaaaaagagctttatctacttcactaacctgttagaagatgaaggcttaatcaatgaaggtgctgcttttatcgatggtactaagattgaagctgatgctaaccgctatacatttgtctggcgcaaagcggttgaaaagtatcatgaaaagctgaaaggccaggcagttgaactttatgatgaattgattactaaagaagtagtcaaagaaatggaaaaagaaaaagttcaaactagtcaggggctaaaggaattagctcaagaaactgaagcagaaattaacaagctgactaaagagattgagcaggaaaacaaagccattcctggcggttcacctcgaaaagccaagcgacgtggactaaaaaagattctgcaccggctaagaaaagattatgtgccaagaatgcaaaaatatgaagaagccgaagagatctttgccggacgcaacagttattccaaaacagatcatgacgccacctttatgcatatgaaggaagaccacatgaaaaatggtcaattaaagcctggctacaatattcaagcagtcacgaccgatcaatatgtagttgattatgccatctttcctaatccgacagatttcaaaactttggagccggttttggatcaaatgaccgtgttggacaagtttgacaaaatcgtcgccgatgctggctatggcagtgaatacaattattcgatgctggaggaaaaatatccagacaagaagtactttattccctacactatgtatgaaaaagaacagaccagaaagtataagaatgatccaactaagctaatcaactggtactacaatgaaaaagatgattattacattgatcatcatggcgtcagattcaatttcaaatattacagccagcgtaaggatcgttctactggtcaggtccgtgattttaaggtttatgaggcagacgagttccagctaacgccagaattggaacaattggctaaaacagctagcggccgccagcgccaagttcgctataatcctaactggcaatatttaaaagaaaaagcaaaagaagttctccaaagcgaagaaggcagacacatctatggcatgagaaaatatgatgtagagccagttttcggacatttgaagaacgtatttggcatgcgcagaacgcacctgcgaggtaaagagaaggtcgaaaccgatatcggaattgcctttatgatgatgaatttgaacaaatattgtcaaagaaggtggctgaagggccgatttttattgttaaaaattttaaagagaacaaaaaaacgatcaagattcttaaaaaaggaaatcttgatcgtttttattcatctggaagctagttttttcccagacactttttttacttcttagtagttttcttggttgcctttttagtagcggttttcttttctgcttcctttttttcaggcttcttatattcacgtattgtggttagcttttcaataattgcctccaccagttgatcaacaatcttcgctggatcttgttcgatctctacttcactggctaattgatcaattctaaagcctgaaacattaacgtattcagagcgcgtttcaaagtaaacatttaaaggatattccttaccctcttcaaagaagttagcaactcgtttgtaattgctataaggcaaattgataatatttgtctccaaggcaaaagtagccggccgctgacccgtcactgctagttgcgtttggatcaatgaattatgcttaaaagcagcgataacttccttgaccatcttttcagcatacggcttgattttgctcttcgacttgctaatgtcggcatatttaactgtttcaagatcttgaatataatcttgattttcaattttttcgttgagatcttttaaattaatttccaaaataaactttcctttttcattggttataattacaaaatactacaaaaaaattttttgtcatcctttttaaggattcaattcagtatttttagctttttatttgttaaaatgacactatgaaaaagcaaaaatttgatcttaagtatttatttttactcattcccattacgttaattctcattataggattgatttacctttttaacaaaaataaaatcgataatgaaattaattggatgacaatgaaggaagaacagcggctcaatgtcccgctagaaaatcaactgcccgatctacccaacggctgcgaggttactagcctatcaatgttactgaattactatgacattaaggttaacaaatatgatctcgccgataatattgctcatgttgattctttcaccgacaacggtaaatatcgcggcaaccccaatcaaggctttgtcggccatatgtctgtcgctaatgctggctggtgcgtttatcatgggcctttatttgacgttgcacgtaaatataccagccacatagaagatgcctctggcagcaattttttagcgattctcaagttaatctccgatgggcatcccgtgctgatcattaccacaaccacttttaatcatgttaacaatatgcaaacatgggaaaccaatactggtaaagtcaacgttacaccgtcatcacatgcctgcgtgatcacgggatacaacaagcaaaagaagcttgtctatgttaataatccttacggtattaaaaaccaaccggttaattggcataacttagaattgagttatgaccaacaaggacgccaggcactttacatcaaataacaaaaaagggcaagccacgaaggcttgtccttttaactcaaggcacatgctcaaagcatatgtggacgtttaaactgttcacatcagtgcgtccaacatcagcacttcccgtgcttgccacttaaggcggatgtcctctatctcataaatatacgcatctcgcgttcattaatcgactcgtcagtcagtaattgtactattttttatgtttgatgtacagtctagcacttttaaaatgacgatatttaaatttataaaaaacttcagtacacatagtcgataacatgaaacctaaagcaatagcaccagtaacaattgctactcgtagaagcaaattctctccttgactataatcccccacaactaaagcacgtactgcttgataagcaggcacgcccgggactaacggtactaaggcaggaatattaaagaccgtcactggactttttttaatgcgtgcaaaacacaagcccaaaatacctatcaaaaaggcgccaattaaatttgaaatcattcgcccaaatcccaaattaaagcaagtccaatatgccatccagcccactgtgccactgactcctgacaggtgaagatcgcgatgcggtacattaatagttaatgcaaaacccaccgaagctacataagaaaaaatgacattaataataatttctaaccaaagtggcatttttatactcctatgaatttaagtacaagtgcaactccaccgcctaaagctaaagcggttaacacagcctcgcacattcgcataatccctgataataaatctcccatgaatagatctcgcaaagcattagtaattgccaagcctgggactaaagtcatcagagcgccgatcaaaatattatcagtaatcatttgtggattaaaatgattgaataatactgccaagatccccatgaccattgctgcaattagctctgataaaaaacgaatcttagtatattttttaaactcataatacgaccaaaaaccaacagcccctactaaggcagcacctgggaaatcaacccagtcgtaattatccataaacaaaaccatcaaggtagcagacaatacagcagctcccaatacctggagccacattgggaaagtaggtgcttgtgatactaaagcaatcttttcttttaattcagaaagagtgatttttttaactgcaaattggcgcgacaagtcattaacccggtctactaattccaaattgatgttgcgatcacgaatttgtttcatctgacttagcttgccaccatctaagctcatgaaaacacaggttggcgtcgcaaaaacacgcggatcatcaattccggcattgcgagcaattctgagcattgtatcttctacccgatacatttcgctcccgccttcgatcattagtcggcccgcagttaaacaaatatccattacttcttgataaaattggacatcccgcttctcagacatagttttagcctcagttcatagtttcaatatcgatggtcttgtcgacccaatcaccgcggaaaaagtcacgttcgtgactaacaataatgactccgcctgggaagttaacaatcgcttttctcaaagcatccttggtatcgttatccaagtgattagtaggttcatcaaggaaaagcaaattagctggttcaaactgcatcttagctaattttactttttcctgttccccaccagaaagttcctttagtggactcattgcttgttgtgcagttaagcccatgcgtgccagcgcttgtcgcaattcctttggctttttgcgttcaaattcttcttgtaaatattggagtggagtcatgttgctattaggccaggttagatcttgcttgaagtaagccaactttgcagtaacagataactcatatgaaccataaattggctttaattgccctaacaatgtcttaagcaaggtagtcttaccaattccgttaaaaccagtaatcgccactttttcatccccaccaacagagaaattgaaggctgacttgaccaaagcatggtcgtaaccgatgaccaaatcttgcgtctgtagcaacaaattagaagcagtcgcaacatatggaaattcaaagcgtgccttgcggttgttttttggcggtgtcaaaacatccatccgcgccagctgcttttcccgtgacttagcactcttagcacgtgtacccgccttgttcttgcgaatataggcctcagtcttagcaatcttgcgttgctggttagcataagccttcaagtaggtctcacggttggctgctttttgccgcaaggcttgcttcaacgttcctgtataacgagtaattgtgccaaaatcgatatcgataatgcagttagtgattcggcccaaaaagtcataatcatgactaacgacaataaaggctccagcaaaattgttcaaatagtcaaccagccaatcaatatgtgaaacatcaagatagttagtcggttcgtctaaaaccagaacatctgggctttgcaacaacaactttgctaaaattattttagagcgctgaccaccagataacttagaaacatcgtgatcatagcctaaatcagctagtcctagtcctgaggcgacttgttcaatttcagtatcaatatcataaaaattattttcttctaaataagtctgtaccttgccggctttttctaacagggcttcgtccccgttttcggcatatttggcatacagatcattcaactctttttctttttgaaataattgatcaaaagccgtccgcaaaaagccacggatagtcacaccaggtgccaatttagcatactggtccaaataaccaacatcaattttattttgccaagttacttgaccatcatcgggcaaaatttcacccgttaaaatcttgattaacgttgacttgccaacaccattttgaccagtaacccccatatggtcttctttgttaagcacaaaattggcatcttcatataaagttttatcaataaaactctgacttaaatctttaacagttaataaactcatttttcatcccctattatttagctgattcatgttctttttcataattttggagtgcatcaagaacacgaggccaatagcgcttaggtaagatcagttgcaaacgatcatgataaataggaaaatcacttgcttttagccccgtaatcttagctagctcctgatctgtcagcttatatttataaacaatacgcttaatttcgactgatgcatgtcctctaaaataggataggccgaagaaaaagatagcaaaaacacttgctgtgatgattgctaattgcaaattcatcctgaagctgtgtagacaaataaaaatcacggcaataaaagaaatcacagctgagagtacaccgtaaataactggaaatattgattctttttcttccttttgcataatcttttcctccctaattgagacttagtaactttacgaacttagcagaaatcagccaaatttgcaagattctacgttttcactgatttttttacataagttaagtatacttagcataattaaaattgcacggagaaaaaaggaaaatgaaacaagaaaaacattattatttcacaccaattcatttgcaaattaatgacttagacgtgcaactagttttgccacaagtcgagcaagcagcagaattatatcaagctgttgcctgtgaccgtgaaaatttaggtaagtggctgccgtgggcctacaaaatgaaaagtgcacacgatgaagctaattttattaaacaaattcaagccaaaatgaaacggcagtcaatactcgttttaacaattttagtcaataagcagccaagtggcatgatcgacctgcataatttgattccaaataaaaaagccgagatcggctattggctgtcgagtaaatatcaagggcatggtattgtcacgaagagcgtaacggcgttatgccagcatgcttttagtgagtttaacctacactatattgatctgctagttgctgtcggcaatgacaaaagtgcaaatgtggctaagcgttgtggttttaaattgatgggaattgaaccacagctaattaatgggcctgacggacaaatttttcgtttgattcgagggtaaatatattgtgttcgcttgttatcaaagctaatattagataaaatatttaaacaagtgtttgagcataacactttactataaaaatgaactcaaatataataaaagtgtaaggtgatatgcatcaatgagtagtcggctcatggtcaatctgattctaatgcaggacataagggcctgacgggtagcagggaccaaaattaaacctgatattacatatctaagacgcaatggcttagttggtggcagacaccaaaattaaaccgactttaggagttcacaatttgtggactccttttttacttggaggaaaagagatgaactataaattatttaaatcagttaatttaaaagaattggggcaattacgtcggtacatatccattatttataatagtgctgatttttatgataaacattttgtaaataaaaccatcatttacactactaaaaataataaaattgaactcactgcaagaagagataactttatgcatttatgtggaatttcatatatcgaagggccaagaaaattttttaatgatgctctagatcgaaaagtacagctaaaaaagttcttattaaaaaagatggctctacttttcagaaattacaagttttaaatcaacttaaagaaatgttaggtccacacttaagattaacaggacgtggagcctttacatacctaaaattcgatcattctttacgtacaaataaaacgatcttggctcttgcattattaaataatcaaaattatatggttccaatctctttgctaaatttgaaattcatccatccatttcctaaaggagataagattattaaaatagaatctaaagatctaaatactggtaagattattactcttagatgattcgcagctaaaaccacccagtcaaatctttaataatgaaaaagataaccggcaccaataatgatggcaagaaattcagagtcttaacatcacgaatttttaataaagacaaaccggagcaagcaatcaaaaagccaccaacaatagacaattcagtaactaatggacctgtaaaaaaatcagccgacaaaaattttgctaccaagtaaatgctaccttgccagcaaaataaaaccggaacgaccgctagcatcccccaaccaaagctagcgccaaagaccatcgaagttactaaatccagcatggcattggtaaatagcatagtattgtttcccttaactgccgccatcacgggacccacgattgacaaagcaccaatacagcaaagcaaaatctcagtagctagacctttagctaaattagatttgcctgctttatcaactaagtgattaaaacgaccagcgatattgagcgcggtaccgactactccacctaaagccaagctaacaatgaacaaaactggatagtgacttttaggcatgctgttagtcacattctcccaaccgatgcctaacgctgccagtcccattgcgatgaacaaaacgtcttcataacgcttattcaatcctttctttaccaagcagccaactgtagtaccaaccagcaaagcgcaagtatttacaattgttccgatcatttttctcacctcttagttttattttaccgcagaaaaaaagtatccatctcggatactttttcatatttaccatttaaaatgccaactactactcgatgacgctgaagaactagatgaagatgtgctttcacccgtacctgaaccataaccagaattcgaaccacctgccggcttatcttgattttgatcataaatccgataattggtgaaagcattgggatcatcccacttgatgtgattgttctgatcattcaattcattttgccgcgtttcttcattgttcaaagtttgtgtttgcaaattcaggttcttacgaattttatctgacgtcttttgtagttccttagtagacgccacctgaattgaagaaccatcaatccaagcatcatgcccttgaatgtagccactctttaagctattcatgcagccacgataattgagcgccaaactaagcatatcattgaatgtcagattagttttcacatatttattgaaaatatctaccagcttgcggtaattgccaagcgtattaaccgacattgccttatgtgcaattgcctcaatcacctgacgttgccgcatctgacgaccatagtcaccacgtgggtcttcttttctcattcgaacataagccaccgcgtgccgtccatttaaatgctgcttgcctttgtggaaatcacaccagtcatacgagaagtcaaatggaacttggacatcgacaccaccaactgcgttaaccaggctttttagcgccttcatattaacttctagataataatcaattggcacatttaacattgatgacacagtcttcatacttgattcatgtccaccgatttcataagcagaatttacccgaaacatgaagtatttattttctggatcgcccttaatatctgccaaagtatcacgtggaattgaagtcattgtcgcagaattcttttgtggattagctgttgctaaaatcatagtatcggaattaccacgatcatggcgaccttcaatcccctggtcaacccctagaactaggatagaaattggctgtttattggcaattttagctgaagtagcagtgttgccgccgtttttaccatcaatcacactatggacggtaaaatacatgtgagcagcccatgccatgccaaaacaagcagttaataatactgccacaccaatcaagcgggcaaaaaagttacctgatttgagcgctgatgcatctgcggctaaagcacgattccgatgaagattaagcgatgaacgatgagcgcgataaccttctcttcgttttggattttggtccattcttttgatcgtttcccttcgaatttaatacaagttagtttatttgtatcacttttaatctctcgataaaataaaaatgctaataattaataataacttatttttttgcgaaatataacgcaacaagctaagatgtatagaaaatgaaatattatggaggtaaaaatggcaattccaactagaaacgaagtccctgaagagcttaaatgggacttaacccgtatttttaaaaatgacgatgaatgggagcaagcttatgcagctgcacaagaaaaagtggctaaacttgctgaattaaaaggtacactagctaaatcaggcaagaacctgtacgagagcttaaccaaaatcttagctgttaaacgtgatgtggaaaatatctacgtttacgctaccatgtccagcgatgttgatacttctaattcgcactatctcggctacgtcagccgggtacaaagtttggctaaccagtttgaggctgcaacaagttttattaatcctgaaatcttgagtatccctagtgataagcttgagcaatttaagcaagctgaacctagattaaaggattacgcacactatcttgaaacaattactaacaagcgtcctcatacattacctgctgagcaagaaaaattgatcgccgatgctggggatgctttaagtgtttctgaaaatacctttaacgttttgaccaactccgacatggaatacggttacgttcaagacgatgacggcaatatggaacaattatcagatggcctttattctttgctgatccaatcccaaaatcgtgatgtcagaaaaggtgcttttgatacactttatgccacttatggacagttccaaaattccttggcttcaactttgtctggcgttgtaaaaaagcacaactataacgcacgtgtgcacaagtataattcagctcgtgaagctgctttagccgataatggcgtacccgtagcagtttatgacactttaatccaggaagttgattcacacctagacttacttcaccgttatgttgcgctacgtaaaaagatcttaggcctgaaggatctgcaaatgtgggacatgtatgtgccactaaccggaagaccttctctttcatacaatttcgaagaagcaaaagagacagcaaaaaaggctttggctccacttggtgaagactacttgaagcatgttgactatatttttaataatcgtgtcatcgacccaatagaatctaaaaacaaggtaactggtgcctactccggtggtgcttatgataccgatccttatgagttgctcaactgggaagataacatcgattcactttatactttagtccacgaaactggtcactccgttcactcctggtacactcgcaatactcaaccttacgtttacggcgactatccaatctttgtggctgaaattgcttcaactactaatgaaaatattttgaccgaatatttcttagaccacattaccgatcctaagacgcgggcctttatcttaaattactaccttgattcatttaaaggcactttattccgtcaaactcaatttgccgtgtttgaacaattcttgcacgaagccgatgctaagggagaaccactgaccgctgacactttagacgacgtttacggtcaaattaatcagcattattacggcgatagcgttgaaccaggcggcgatattgcccttgaatggtcacgaattccacacttctactacaatttctatgtgtaccaatatgcgactggctttgcggctgcaacggcattagcaaacaaggtggttcatggaacgcctgctgagagggatgcctaccttggtttccttaaagctggttcaagtgattacccaactgagatcatgaagcgtgctggcgtagacatgactaagcctgactacttagaagatgccttcaagacttttgaaaaacggttgaacgaatttgaaagcttgattgagaaataaataatcgcgctcatataaaaataatcgatatcatttcgtgagatttgatatcgattttttgttgatgatcttgatttattacttggcatatttatcgctcaatatgtataatacgtatataagtattatagtgccagaaaaggtgaaaaatatggctgaaactttatataaaaaggtcgttaaaaatggttcttccttagctatcaatatcccagctaaggaagtaaaagagcaaaatctcaaagtaggcgatattgttgaagtaaaaatcaaaaaatcagaccgtcctaattctgaaaatttaaaagaaatagatggcttaatttctgattactgggatatgttagagtacttaaaggataagtagtcaatgaagatcaattatctaacagaaaaggatattttagtaatcaatgcaagggttattcaaagagaaggtgcaacgggacaaaaacctcacgttagggatgcagaagcccttcattttttagttgttcaacctaagcaaactagttttggacaagaattatatccgtcttttgctgaaaaagctgggattttattaattaaattagttaaaaagcatgtttttgaagatgcaaataaacggactacagcaattgcattcttactatttttacgacgcaattcttatgaactaacctgtgattggcaagatttagcaaatcaaatcttaaagatcgctcaaatagatgacaatgaactaaattaccaagaaatctatcaatgggttaatcaagtaattcatgaaaactaaaaataatcgatatcattttcgccctaatattatattttatatgaaataataaccactttataaaaaaataagggctattaacccttattcataataaatccatcaactatttcctatgtcatactactactcgattgtcctgcataaccagctagtgtagcctgcaagtcatgaataactttaggagcattaaaatttttagcaaattcgtactgttgcaattgataatataatctagaaccgatatataaagcagaatcattattttccgcttgatcaattgttctatccaaaattcttaccaaatttggattatcaattacatctttactaaaacgaactttttctagttcattttttaactttaaagtctcatccttcttaatcattatttacaccaaaggatgcgcaaatggtccatccttctgccatccagtatacataatacgaccaacgctatcccacatttgtgctaaattatcatgacaataatatcggttgcaatatacaccattaccatagtaatggtactttccgcctccgcgcttgtgatgtgtaccgcctaaaacttgacttaattgattttcttttagttcttgaaactttaccattccagacacctccgataaatctttaagcctgcctcacttagtacttctatcaacttacatatataagtctaccaaaacagtagtgttttctaagaaaacgtcagaaactggcaacgttcatatcatattctgttaaaatacataatttgatcaagaatttagtacctgtcgatttaccaatcaaatactccagttacaataccgttagcacccactgctgcatatctttctagtttcagctgaagttcaactatagctttaggtagttcattttcactaaagttttctttcaatttcaaagacaaattagaagcaatcgattgaattgactcatgcttatcagctttcgcaatagcagcttgtaataactcaaccaattcggcatttttcttaacttgaggatctgaaatcactgtattcaatctactcttaaatgcagcttcttctttaagattctttttaaagaacatatttatctccttgtattaaccttgatttttcagaaaatcatacaactcagtagctgtttttcctccacctacccatgcgttagcaatttcaccgtttttaattcgcataacagtgggagtacctggcacttccaagttatcaaaagcataatctgcattatctttactttcatcaatatttaaatagtataattgaccaccaatcagattattaaattcatttaaagtggctgaatattgtcgacaataatagcacgttgggcaaccaatatacaaatatctatcaatattacgcgtggtgctagttaaatcgttttagttaataaaaaagtccaatcttgttagactcgacttgtaaatagtaataatagaaaagagtctgatctgattgaactgccttaagcttaagcgttttagccaccatttacaagttagttttaaagatttagtgataatttgtcggcactggtatcgtttgtatgcaccggctgagtttactcatcggcgaaatattgatcaaattaaaactacggacagtctgattttggctttacttatctggcaagctaagacaggaattgaatcacaaagaagattctgtgaatgtttcaattgtttatcacactcacgttttaatcggcgttcacgtcagctattgcaattgatttatcagatacggcaagaaatgaataaaaaggttgacctgaatggacagttcttgatcattgacagctttccggtacctgtttgccaaccaattcgaaactatcgtgctaaaatttttcgcggttatgccaacattggttataaggccaccaagaaaatttacttctatggtttcaaagttcatgccattgttagcgatgacggttacattcttgattatgtcgtaacaaaggcatcagttcatgatgccagggagacagttgaactgatagaaaatacccatccatctaattactatcttcttggcgacgaaggctatttaggcaaagaactgcatcaacagctaaaacaaatgggttacgaactttggacaccatatcgtaaaaatatgacaggagctaaaaagcacaatgatcatcaattgatggctattcgcagaacaattgaaagcgacttttcgcttctgacctattacaatgccgagaacaatcgagcacgtagtctgataggctttcaaagccggttggaaattgcaattttagcttataatttggcttattgtctagaacgatttaactagcaccacgcgtgatgtatatgttaacaatatataacgataacatggatattgaattaatttggttaaaattatacatgtaagttgatgatgcgcttagaagtactaagcgaggtagacttaaaaatttatcggaggtataaaaatggaaaatactgttggttttgaaaagttaagttcaaacgaattggtaagtgttgtaggaggtagtaaaggatggaacaagttttggaagtcggaaggtaagtattggcgtggatttaaggaaggactatgtaaatatgcgaggtgaggaataattatgaaaaaatttgaaagtttaaaagatgaaaacttactagaatgtgtaggtggtaaaagaggctataattgctataaatttggtaaggatgttggtagaacagtaaaacttgtggcaccaattgtgattccattgttttgctgctgagatttttgtaggaatataaaactatgaaaaagcaataaaaatatacaaatatttttattttattaattttaggtattttagctataaattggcaagttgtagcgtctccaattaagaaactgtcaaatcttttgtgtaaatagttctttctcgtaaattgattttttaattatttatttaatcaaagtaggattctaaggtgtcctgaacctgaccaaagcctttatgaattcgattgaaataacggtcattgtagctcattgcctgaatgccaataaaagcatcaagcgactgttcagttggaaactctgccttaggcttagctttgcgcttgatcacattgttaaatgattcaatcatgttagtcgaataaattgaagctctgatctgcttgggatagttataaaagaccagcagatctggttctatgtctttcaagcttctgataacatggctgtaaaccttgccccatttggtatagaagtcatgcaggacagctgtggcttcttctttgtttgtctgttgatgcacctgtttgaattcgttcatgatcttttcacgatcgtcgacgcgtactttagcgcagatattgcgcatgacatgaaccaagcagcgttgaaaatgagctttaggataagtcctggccaaggctgttttcatgccaacaacaccatcagaaagaaaaagctcaacttgctttaagcctcgggatttcatgttttgaagcatatctgtccagacttcaatgttctcgctaggtgcaatgcagtagtcaatgacctccttgtgcccattaggcttgatgccaatggcaatatagactgcttcacgctcaaatgtttctcggcgcaaaggaaggtatgtcgcatccaaatagacgcagaaaaacttgtcgcttagcttgcgtttgtggtaagcctcaacctttggaatcatctgcttggaaatatttgatacctgggctggactgtaatggctgccatacatcttttcaattagatcggctatttccctggtggtcacgcccttggagtaaagcttgataatcatgctttccaagatatccgagtgctgcttgtagccaggcagcgtgtgctgatgaaattgaccgttgcgatcccgaggcacttgcacttcaattgggccaaattgcgtatcaactttgcggaaataagcaccatttctagagttgccagtattccagccatttctggcatagggatcatagcccagaaaggcagtcaattcagcttctaacaagttattaacagcctgttgtagctctttgcgcaataaatcatttattttgtctggattgaatagagcttgagcaaaatctttggtaaaatcattcatgaaggagttcttctttctgtatgtgtttttttgttcaaaccaatcatacgagaaaggaactcctttttctaatgtttaaagaaataaatttaaggaatcattcatccttacacaaaatattttacagtctcttaattcagatgaagtagattcttttttcgataaaaaagataatattgatacgcgtggtgctagttaaatcgttttagttaataaaaaagtccaatcggactagactcaagttgtagtatcaaaaagaaaagagtctgatctgattgaactgccttaagcttaagcgttttagccaccatttacaagttagttttaaagatttagtgataatttgtcggcactggtatcgtttgtatgcaccggctgagtttactcatcggcgaaatattgatcaaattaaaactacggacagtctgattttggctttacttatctggcaagctaagacaggaattgaatcacaaagaagattctgtgaatgtttcaattgtttatcacactcacgttttaatcgacgttcacgtcagctattgcaattgatttatcagatacggcaagaaatgaataaaaaggttgacctgaatggacagttcttgatcattgacagctttccggtacctgtttgccaaccaattcgcaactatcgtgctaaaatttttcgcggttatgccaacattggttataaggccaccaagaaaatttacttctatggtttcaaagttcatgtcattgttagcgatgacggttacattcttgattatgtcgtaacaaaagcatcagttcatgatgccagggagacagttgaactgatggaaaatacccatccatctaattactatcttcttggcgacgaaggctatttaggcaaagaactgcatcaacagctaaaacaaatgggttatgaactttggacaccatatcgtaaaaatatgacaggagctaaaaagcacaatgatcatcaattgatggctattcgcagaacaattgaaagcgacttttcgcttctgacctattacaatgccgagaacaatcgagcacgtagtctgataggctttcaaagccggttggaaattgcaattttagcttataatttggcttattgtctagaacgatttaactagcaccacgcgtataaaaaataaataaatctactattggtgaaattaatccctgtatcgctatcattactttaatccaagaaactttttccaattaaagtgaaacaatgggcgttttgacttattaacaatattattcattgcaaacaaattttgattaaaaaccatattagtaatagcaaatccacctttaacctcaactagctcttcttcattcaactttttcattatttatgcttcctttcaatttaatgcactaacaatttttacactgttaatgttactacgagcgcaactttatgattaaaatcgtcatattctgtaccatttagatcatattctgcattttcaattaaaatgctcctccaccagaaccatttccccaactattcgacttcttcttgaaaaaatagcgtttagattttgatcgtccacccacaatttagacatgaactagatagcttccgcatattttctcttcccttcatttaccattttgttacaaataaaagcataactctatctagcttctcaaaattaagctcatcagattttgcattatcctaatcatattttgctaaaaataatcaatcctctttctcctctggccaaaaaagatcatctaatgtcttatccagcgcctggcaaatcctgatacacaagttaaccgacgggttataatttcccttctcaatcgcagaaatcgtctgtcttgaaacatcaatctgctgcgccaaatcttcttgcgttaaatctttaccgactcgcgcagccttcatttttaaatttttcaatccttatcactttccttatcacgatggagttgaaacaggcttactgctccaataatcaaccaataaatccccataatgttcagcgcactgttaaagtcatcaatatatcctagaatcaagcaaataccaagtaaaatatatagccaactatttgccttaacatgctcttcattaaatgcaaaatatgctccatggactatatcgtaaactgacatcaccgttaatgacaacataataattgcaaagttaacagcaataccatgctttgtataaaaatccgtctgcatgaataaagcagaaattacttctccaacgattaacacaagaaagctatacctgtcaccacgaccacgaatcaattcctgtcgttcatcatactttgccgcacgacgatttcccacgaatacaacgactaagatgaaagtcataactgcaaacaagcttgcaaaagccattaattttaatatttcaaattttgacattttacacatccctttcttttaatagtttgatattaagcccatattttcaaaatgtaaagtatgttttacatttttactaataaatttgtatttataaaaactagcattaacataatcggtatcatttcactagatttgataccgattatttgttaatgatacctatttttcaaaaatttccttgacttcttcttttaatcgtcgtattataatgacaattaaattaataaaagcttagaagagatgagtaattacttaagacttctgcagagagtcggagttggtgcaagccgatgtggttgagagtaatgaatatggtcttggagctagtttaaagagcaagctgttaagtaagcaatttacgagtgacgatcgttaccccgtccgagtattcccaattttgggagcacttagtaaggagttagttgtgaagctaacttgaatttgggtggtaacacgcttaggcgtccctagcatagaaattctatgctaagggcgctttttattttgcttatttaatttttcagaaaggagccagacaatggataaacctatcaaaactacaagttcacaaatcatcatcagtaaaaaggcattcaaccgaatgtgcactattgtctggttgatcttgatcatcatcggacttttcatcgttaaataaaacatcgaagcaaaactaaggagaaaaattatgacagaattacattacgatatcgttggtagctttttaagacctgcagaattaaaaaaggctcgcgcagaatttgaagaaggaaagattaagcaagaagaattaactcatgttgaaaatacagagatcagagaattagttcaaaaagagattgatcatggccttaaaatcgtaactgatggtgaattcagaagaagttattggcatcttgataccttctggggctttgggggtattaaacacactaagcaggcccacggctatttcttccatgatgaagaaactcgtaacgactctgcccaagttgagggaaaaattaaatttactggtaaacatccagatctttcatcatttgaatacttaaaaaaggttgtcgatgaaactggcgctaacgtaattccacggcaaagtattccagctcccgcacaattttacgcagaacttgttcgtggagaagaaaatattgccgcacttaaaaagatttatagttcagaagaagatttactcaccgatatttctaaagcataccgagacttaattttagccttatacgatgcaggatgtcgcgacattaaactcgatgactgtacttggggtatgattgtagataagcgctattggaaaagtcatttacaagatgacttttcactagacgaccttaaaagaaaatacttgaagcttaacaatgatgcaatcaaagatttgccaacagatttgcgaatatcaactcatatttgtcgcggtaactatcactcaacttgggcagcccaaggaggttatggtccagtagcggactatgtttttgctaaggaaaatgttgacgccttttatcttgaatttgacaatgatagatctggcagttttgacccaattgcacaaattcctaacgacaaacttgttgtcttaggtttagtaactagtaaaaaagcagaattagaagatccacaaaaattaatcgctagaattaaagaagctgctgaattccacccactaaatagtctcgctttaagcacacagtgtggcttcgcctcaactgaagaaggcaacacgttaaccgaagatgaccagtggcaaaagatcaagttggttgtcgacactgccaagcaagtttggagctaaatggcaattaactagttaaaataaagataaatagatttagacaaaggagaaaaaaatcatgggaaaagttgaaagttttgaattagatcatactaaagttaaggcaccttacgttcgtttaatcactgttgaaaaaggccaaaaaggtgaccagattagcaacttcgatttgcgtttagttcaacctaataagaacgccattcctactggctgcttgcacacgattgaacaccttttagccggtcttttacgtgaccgcatcgacggctacattgactgttcaccatttggctgtcggactggcttccatcttttagtttggggcaccccatcaactactgaagttgccaaggcacttaaggagtcattagaagaaatccgtgacaacattaaatgggaagacgtaccagggacaacgattgaatcttgtggtaattatcgcgaccactcattattctcagctaagcaatggtcaagagatattttggctgaaggcatttctgatgacccatttgaaagacatgtggttgaataaaatttaaaggtttaactgaaaaatagtaaataattaaaaaagctagcaattcattttagtgaactactagctcttattttttcacttatatcatcccggcaactaagccaactatatacaagaagacacagcagactaccaaatacaaaccgccccacttgaccgtttcttttaggatctcgccttcgtctccctcacgattaattgagccggttgctactgcaatattctgcggtgaaagcatccctgccgtggcccctgtcatgttcgaggctacaacccagtacttacttacgcctaagtccgttgctgcagtatactgcaaattaccaaataaaacattagctgatgtagcagatcctgttaaaaatgttcctagtgcaccaattaacggcgcaaacaatggataaactggtcctaaaaggccaaccaaggccactgctaatgcattcgtcataccagcataaaccattaccttagccaagcctacaatcgcacaaactgtaattgtagttttccatacgctttttatcgattgtcctaatatttgcatcatttttttcaagctgacaccctgaatcgccccaccaattaatgtagctacaaaaattaatgttccaggagaagataaccaactaattgacaatgtatttgggttctttcctgtataaacaacaagattagtggttactttattaagtacatcattgacagctggaactaatgaagaagcaaagatcacgaagataaagaccaaaataaatggtgaacatgccttgagcatttccttagcatttggacgtaaaacatctggctcttcttcatcatcatgccatctagttaataagactgtaatcgcaattgaacacaatgagccaacaattgcaggcaattctgcccctacaaattttgcagctattacctggggaatagccattcccagtcctgacatcaatgtaataaagcctacacctttaattgccttaatgctgccttcagtcaagataactaaaataaatggtaccagtattaccaaaatagataattgcaatgttacgatgaaggatagtttttcttgatgtagacccgtcacttcagctaaagttaaaactggtaatccaattgcaccaaaagccgtcgcagttgtattagcaatcaaactaatgactgacgcgcgaatcggatccaagccaaaggcaatcaatattcctgccgcaattgctaccgcagtcccaaagccagcgattgattctaaaaagccaccaaatccccaagcaataatcaaaacaataatccgcttatcggttgaaatcgtcgccagcatattttgaataatttccataccgccagattctgtagtaacgttatatgcaaataaagccatgacaataacaaacataatcggccaaatgcccatgataatgccttctagcgccccacttgccgtatctagcaccggtactttaaaactaaagactgctaacaccatcgtcaaaattaagccaatgacacaagcgcgtgcagctggcattcgcataactcccagcgaaataatcaaccaaacgatcggcaacaatgcgatcgcaaatctaatccacatcaaaatcctccatcatcaaaagtgttgtactatattatttaatcatgatttgggtaaaaagttaaaataagacacaaaattttagtttaaattacaattttcacaaatttcgaaactgtcaaatcttttgtgtaaatagttctttctcgcaaattgattttttaattatttatttaatcaaagtaggattctaaggtgtcctgaacctgaccaaagcctttatgaattcgattgaaataacggtcattgtagctcattgcctgaatgccaataaaagcatcaagcgactgttcagttggaaactctgccttaggcttagctttgcgcttgatcacattgttaaatgattcaatcatgttagtcgaataaattgaagctctgatctgcttgggatagttataaaagaccagcagatctggttctatgtctttcaagcttctgataacatggctgtaaaccttgccccatttggtatagaagtcatgcaggacagctgtggcttcttctttgtttgtctgttgatgcacctgtttgaattcgttcatgatcttttcacgatcgtcgacgcgtactttagcgcagatattgcgcatgacatgaaccaggcagcgttgaaaatgagctttaggataagtcctggccaaggctgttttcatgccaacaacaccatcagaaagaaaaagctcaacttgctttaagcctcgggatttcatgttttgaagcatatctgtccagacttcaatgttctcgctaggtgcaatgcagtagtcaatgacctccttgtgcccattaggcttgatgccaatggcaatatagactgcttcacgctcaaatgtttctcggcgcaaaggaaggtatgtcgcatccaaatagacgcagaaaaacttgtcgcttagcttgcgtttgtggtaagcctcaacctttggaatcatctgcttggaaatatttgatacctgagctggactgtaatggctgccatacatcttttcaattagatcggctatttccctggtggtcacgcccttggagtaaagcttgataatcatgctttccaagatatccgagtgctgcttgtagtcaggcagcgtgtgctgatgaaattgaccgttgcgatcccgaggcacttgcacttcaattggtccaaactgggtatcaaccttgcggaaataagcaccatttctagaattgccagtattccagccatttctggcatagggatcatagcctagaaaggcagtcaactcagcttctagcaagttattaacagcctgttgtagctctttgcgcaataaatcatttattttgtctggattgaatagagcttgagcaaaatctttggtaaaatcattcatgaaggagttcttctttctgtatgtgtttttttgttcaaaccaatcatacgagaaaggaactcctttttctaatgttttaagaaataaatttaaggaattattcatccttacacaaactattttacagtctccaaatttcacttgcaagtttaaccaacaaactatataacaattaatggaaagtaaaatttctcacatcatgtttgaactactccgtggaatagagtagttctttttttgcgtaaaaaaatagccagaccgaattcagcctgacttctgttttttttagcgatgtttaattacgtgaataccataagcgattaagtaaattaccacttcgatcgttgcaataaagaaagttaccggccagttggtgataaagccgagatacagtccagcccacacgccaactaaagcgaaaaacacggaccaactgatcattgctggtattgttttaccaatatagcgcgccgttgaagatggcaatgttaatagaatgaagactagcaatgaaccaacaatctgggcaccgatagcaactgacatagccaaggctaccaagaaagcaataccaacccagccagtatgtacaccatgtgcaacggcaccgatatggtcaaatgagtcaaaattcaagcttcgagctaccaaaataattaatagtaaaactagaattgacaaaaccactagctgaatcacgccttgtttatcaacaccgatgatactaccaaacagaatattagtagcgtaacggctatttgatccagaaatggctaagaacagcacacctagcccaataaacagagctgagatcgcactaactgacgattctttttgatcgctgtgcaaggacaattctcctactccaattgaaccgagcaaggtaaatagtagcatcccccataacggtgcaatgccgataaagacggcaaaagctgctccagcaaagccgatttctgacagtgtgtgagctaaaaaagcataactccgtgctactacatatacaccgaccacgccacaggtaatcgcaatgaatgtactagctaagaaggcataacgcataaattcgtattgaaacattattcgaaatcctccttaaatttatccatctttccttgcctgatcgttcccttatttaaatatagataatcagtcatatactttttagctaaaggaatatcatgagtgacaaacaaaacggtaattttgtgttcacgattcaggtgcttgattaatcccatcaattcttccttagcagccggatctaggctagctgttgcttcatctaagatgatcatattgggatgatcaagtagagcctgcgctaaatatgcacgttgtttttgtccacctgatgcctcacccattcgggtattctgaatcttttctaaatgagtttcttctaactgatgatcaatctgttccttaacctttttggtcttaaacaatggggcgttaagtccaataaatgcacgaatcgacaatggatactccgcatcaatatttctaaactggggtacataacctaacttaacgtctgaatcaaacttaaagttgcccgcagtcggctttaacatccccattaaaatcttaattaaggtggtcttccctgttccattaggtccaagtagtgcagtcattgacccgtcttcaagctgaaaactcaaatcttgaaaaacatctttagtatcaaatctcatcgagagatcatttacttctaaaatcactcttctaccccctccctaagttgctattatttttctattttagccaaattttgataattttctttcatccaagccaagtaagtagtgtggttaggaatagtctcccgcacatttaacactggaatattattttccttagctaattttacaaataacttcacagttgaactgcttgcctgtgtattgttaacaaagaatgcaatcttttttgctttaatttcattattcatttgattaatcatcttaggactcggatcagtaccattctcaattgcttcttcaaagcccttatccccaatcttgtatcctgcttctcttaaagcataatcaaagacaggttcactaacaaagactggcttactatttttcttattagtcttcaccaattgcttaacttgattaatcttagctaaatacttgtcaccattagctttaaaataagctgcatgctttttatcaagcttagataaacgcttaactaggtaattaacatacttggttggcatacttagattgtaccaaatatgcggattatcccccttctttaatcccatcaagtcttcaccaactaagacaggctttttgctaacagaactagctagcttattcatccaagaatcatagcctaagccattagcaacaataatatttgccttggtcaattctttagcatctgccgtagttggttcaaaatcatgaggatcggtactgctattgctaatgattgccttagccgtaccatattttcctacaacatttttagcaatatctgcataaacattggtggtggtaataatcgagacttcacccgaattgctcgtcgaatttgatctattcgagcaagctgaaactaacagcgcaataacgccaattagtcccaaaaaagagattaacttcgtaattttagatttcgcattttgcataaaatatcctccttgtgcaaaataaaaaagcatttaagttagaaaattcagcataaattctaactaaaagttagaataatctagttaattacatatgtcaacatatttttgcatagacaaatagcaccagtctcccataagcctgatgctatcaataatttaagtcataaaattttgctgaattttattaaatgctttgttctaaaattacattattatataaacatatttttatataattgtcaaactaaattaaaattcttccttcacgtgctgacgcaaaacatctaagattttaatcacatgcttatcttctaagctataatagcgctcctgcctaacccgctcgctcttaactagcttagcctcttccaaaatacgcaagtgacgcgaaatagctggctgactaacatcaaactgcttaactaaattattaacactacttttttgattatcatttaaataatataagatttgaattcgaatcggatgattcaacgctctagtaatccgaataatttgctcgtccaatttcttcacccattcatactttttaatttattatagcttaaatttaggtataaaaaaacgctacccttcgggtagcgcaaaacataacagagtatcttgatttaagtagagatcatcaagatatttatattataatacgtttttgccaaaatgtattgttttttgattaataaccagaattatttaataataatattcgatattacttatagtattattcgtttgggtcttctttgacattcttcttccagaaactcatgattaaaccagcaacgattgaaccaataatagtagctaggaagtagaataagatgtggcttggaccaccgatgttaccagcaagtggtgatacccaaagaccaccgtgaggagctgggacaccaacgtgccataaaccaactaaagcaccaccaacagctgaaccaatgatacatgatggaattacacgacctgggtcagcagcagcaaatggaatagcaccttcagtaatgaatgagaagcctaatacccagttagaaacacccgcacgacgttcttctacagtgtacttgttcttgaagaatgtagtaccaattgcagtagcaaatggtggaaccataccacccaccattacagcagccatcaagatagcagcagtagctgagtgagggtcgttagcaaatgcacctgaagcgaagacataagcagccttgttgaaaggaccacccatatcgattgacatcattccggcaaggatagtggtcaaaagtaccaagttaccagtacccattccgttcaagaaatgagtaatagcaaagttaatgccactaaagattgggttaatgatgtagaacataattgctgcaataaagagcaatcctaaaattggatagaacagcattggcttcataccttcaacagaacgaggtaatttagcaaatactttcttcaaaccaaccatcaagtaaccagcaataaaaccagcagcaataccgcctaagaagccggctggtgaagttgcgtgagcttgaacgttaacttggaattgaccgttaacaatagaggccatgtaaccaccaacaaaacctggcattaaggctggcaaatcaccgattgattcagcgatataggctgccaaaactggaaccatgaaggcaaatgccaagttaccagcattgtttaaaaagatgaaagcaggagtcttagcgccacccatgtagttttctacgatgaatgagatggccattaagataccaccaccaataacgaatggaagcatgtgactaataccattcatcaagttcttgtagatacctgcccacaaacctggcttctcagttgatgaagattcagttgacttgtcttgagcacttgcacggtaaacatcagccttaccacccataatgtcatcaatcaattcgcctggcttgttaattccatcaacaacaggacggttaactaagtgcttgccgtcaaaacgtggcatatcaactttcttatcagaagcgataataacacctttagcacgcttgatttcatcaggagtcaacttatccttaaccccttctgaaccgttagtttcaattctaacttcgatgccgcgcttcttaccttccttaatcaaggcttcttgagccatgtaagtgtgggcaataccgttaatacatgcagtaacaccaacaatcaatggcttgttgtcgtcatcacttgtaccttgagccttagcagcttccttagccttcttagcttcagctgccttcttgtcttcttcgtcttttttagcttcagccttttcaaaaagatcgataacttcttcaggagtcttagtattcttcaaagcttcaactaaatcaggatcaattaacaaacctgaaagttttgctaatgcttgaaggtgagtattgtcagcaccatctggtgcagtaatcatgaagaataagtgaactggttgaccatcaagtgaattatagtcaattccttccttactcttggcgaataatacgcgtgccttgttaatagatttgttacgtgcgtgaggcatcgcaattccgccaccaataccagtagttgattcgttttcacgtgcccagattgacttaataaaagcatcttcgtcgttaacgatatcagttgctacttcaaggtcagccatttctttaatggcatcttctttgttcttagccttaagctccataatcatggagtcagggcttaaaatatccttgattctcatatttttcccctcgttttttattaagaaatttgctcaactttgatttgtggaagaacagcatcaatttggctcttaactgcaatgtccttagtaaaggcagtagcagcaccacaagccattccaattctgaagccttccttaggatcttgggtcttgtagtaagtaccaacgaagccggcaatcattgaatcacctgcaccaactgagttaacagcagtaccaacagcacccttagcatggtaaacatgatccttggtaagaaggaaaccaccttcaccagccatagaaaccatcacattttgagcacccttatctaaaagcttttgtgcgtattcaagcatcacatcacttgaatcaaaagttacgccaaacaagtctgctaattcatggtggttaggcttaattactagtggcttatatgccaaagtatcaagtaaagcttgtccagtagtatcaacaacaaattctgcacctgcttctttaatagtaggaagcaatgattgatagaaatcagttggaaggcttggagtaagagaaccgctcattactacaatgtcgcccttctttaaatcgtttaaacgatccttaaaagcagtgatttcttggtcggtaatgttaggaccagccgcgttaatttcagtttccttttcagcgtggatcttaacattcacacgagtgttatctgaaatagtaacgaaatcactttcaattctcttttgattcaattgacgaaccaattccttaccagtgaagccacctacgaagccccatgccgtattatcaacatttaattggttaaggatttgagaaacgttaattcccttaccccctgctaaaaatgaatcattgttagttctgttaacttctccgcggttaactttttctaattgaagaacatagtcaagcgctggattaacagttactgtataaatcatcctattttgcctcctctaattcaataccgactggtaatgaccgtttttgacctggttttagttgatcagttaccacaatcacgtcacttgtattggcaaacacagcaaagttacgctcaccgattttactattatcagttaatacataagcgtgtcttgcctgtttgatttcggctgccttaaccgcagcttcctctggatcaggtgtagttagattgccatttttttcaattccattagcaccaacgaagctagctgaaaaattcattgccttaatctgacttaaggcggtctgacctataacagcatgcgtatcgtccttaacttcaccgccaattagaattgtgttaattccgtgatttaaactgcataaagcagtctctacaccattagtaataatcttgacgttagcaacctctgctaaaaatggtaccatctcataagttgttgttcctgcatcaatgaagacattgtcacctggacgaacaaaattctgcacggcatatctagcaatagtgatttttgcgtcatgattcaaactgaagcgaacgttttgtgatacatcacgagaaaaatgtttaactgattgggcaccgccatgaacacgcttaaggatcccatttttttccatctgaattagatctcgacggatagttgattcagatgttgcggttaagtcacataattcacttacgcgacataactcgtgttgattaacatagtcttcgattaagctttggcgctcctgagtcagcatcatttctcacctcgataaatattgtattcgctttctcctccaaaatcaatcatttttcttcaaaaaatgtcatttttatttattatcgttcaataacattcatttatatgcaaaaaagatgccgttttttgattgaaacgacatcttttcttcgtcatttggaattattcttagtcgttttaccctatttgactaagaatccgtaaagatgactaagaaagagaaccaaagatctattaaccttgcaaaagcaaaacacgctgaatcattattgattcagcgcgttttactattaaatatattttgtctagcctctcaagctacgcttaaagttttgccatgggccgacatcatctgtttgcaaaatcaagtttggatagatttttctaatccagataaatgacgctactgtagcggctaaagcaattaaagcagagatagctgcctctaaattagttgcgttacccataattactctagctggcattacaaatgatgatagaaacgggatgtacgataatactttagcaaaaatcgtatccccacctgattgcatattgactgtgaacaagaacccgatcaacatcaatgtagatagtggtcccaccgctttgttggcattctcgcttttagcaaccaaagcgccacagaaagctgcaaagataataaacaataccaagccgattatcgtaaacaccaatccccaagaagccagattgccaattgcttgatcaatcatcggcttatactgtctaaataaatcgctaaagctatcgatgtatggggccgcgcaataaactgccacaaaaccaacaacataaattaacacttgggtgataatttcaccaaaaatacctaaaatcttcccagtgaaataatcgccacctggcatactcgaaaagattacttccattatcttggtacccttctccgtagcgatatcttgtgctgttacttgcgtataagtgatcacaagcatgtacaagataatcagcaaaacccagaaggaaatttgcttaacaggatcattatcaaagctcttcttatcaacatgcttaacttgttgcttaaattgcgctcgcgtagctaaagactgagtctgttttgtcgttagcttggccttacttaaattcaattgttgctgggcggtgtttaggctagttagcagctctgattttagatcactgtccattttttcatcactatagtaagttgcagctaattgattattcttttgttcaattaaaacatagccatcgatatcttcatctttatacgcctttttagccttagcttcagtgctatagttgtcaaagtcttctgactttttaattgcttgctttaaggcagaattagaagtaactaccccgacatagttgtcatcactgccgccagctgataccattccgataacaaatgaaaagaagacgagcagaaacggtgctaaaatcatcagcaaatatgaccaagttttcacttctctacggtaggtttcttttgcgacaagccagatcttattcatgacgcgcacctgctttcattttgaaaatctcgtctaaagttggaggttcctggtcaaaagtctggatatattgaccggccgaaagttggttaaaaatatccttaccatatttttcgtctgcaagaataagcagcttcattccattgttttgcaaaattatatcttttacacctggtaaggctgataattcagtagcacttttgtctgtcctgacaaaaattcgagttaggccaaagctgttcttaatttcatttactgggccattcaagacgatatgcccatcattgatcattacgacgtcatcgcacaattcttccacgttacgcatatcatgatcagaaaaaatgatcgtagcgccttttcttttttcttccaaaatcagctgcttcattagatcaacattaacaggatctagtccactgaatggttcatctaaaataatcaatttaggttgatgaattaaagttgcaatcatctgtactttttgttggttacctttagacaaagacttaatcttatccatggggatccctttaacagccaaacgtgataaccaatcaggcaattcttcttttacctttttagccggcatccctttaaggctagccaaaaacactacctgatctgaaatagttaacttaggcatcaaacttcgctcttcaggcagatagccaatattgtcataatctttagcgttgaaagaatgtccatcaatactaatctggccgtcataatcaacgaatttcaaaatactatgaaagatcgtcgacttacccgacccatttttaccaaccagtccaagaatacgcccatctgacacactgaagctaacatcaaacaaaacctgtgttgacccgaagcttttatttaggtgttctatttttaacataatttttcctcaactttttatctaatggttattagacctagaagtacaccgtcaaagaactgccataaagtatcggttgaaaaaattgtttttacaatatcaactgacccccaattggttactaaagtaatcactacaccagctgaagcaaccactactcctgtaccaataacttgaggggcaagtttcaacactttcttctgccatggaatctttgatgcgaccgttttattaaggactaagcttgcggacatgatgccaccaaacattagaccgaaagccaatccggctccaatcgacataataatttgaaaaggttgaggcgaaccagcagtcttaacatacatcatcacaagagctaatattggtccaacaagtgctccaattcccatgccttcaataattcgtttgttttcacgagcaaatttttcattattcattgttcttacctcaaggaaattttcagctaattaaacaaatccgaaaacttagtcggaatgttgttcttggcgaagtatttcttgaatgcatccccaaaactcaattgatctttttctctattttcaagcaaatcatgaacagctaagaatgctgtaacggcgtaattaacggctaaaatgattaacaaaccgagcacaatataaattaagtacagcattgttctttcctccaattcagcgattatctcccaggaaataatcttttatccttttaaattaatcatatccccatcatttatgtaaaaggtaaaaccgtccaattctgtcatttttcggactgattttgcattttattcttcatcttttttataaactaataaatcccctggttgacaatccaagacttcacagatcttgctcaacgtgtcgaagcgaacgccatgcgcctttcctgtcttcagaatcgacaggttagccggcgttataccaactttctctgccaactcctttgaagacatctttcgcttcaagagcataaaatctagtgtcacttcaatcatctatatcaacctttctaaataatcgagtctgcatcctcctgaaccttcattccgtacttgaataccaagtagactacgtatagtactgctaggaaaagcaaaccagttgtcacaccacttgggtatagtacattattcgaggatttagcgaaccaagtgcggtgagttatgaaaataatgtaatctattattgaaataagggtatatccagcaactgaaattaataatttcttgagtaaattcaaattactatcagcaaagtaaacttcttgcttgatattcttaacaattaatctggcatatcgacagattaaaaaggctgcaacgctcatcatgatcagtgatagcaacacaaccactattgcaccgatatagttatcaactgatacgccttttatacccctaccactttcaaagccagcacgaaaatccggattatgtataccaaataacacaacacctcccataacgatccacataattattcctatcacacaaaatatttggtaaatccaagcaaaaatcgtaagcaaattcaaaattaattttttcatttttctatcctctcaaaatatggatgattctgtatatagcactgccaattacacccgttactccaattactaataatgtaattctaagaacactccatgttccgcctaagttagcaaacactaagattgccatcattatcagcattccaataattgaacctatctgtcttttcttttctggaagcatatctatccctctcttccataaaactatctatctctttctcgtcttttataattattgtattacgataatttataattgcaatacagaaataaaatatttttttgagataataaaaaaataccaaattagtcgttaaactaacttggtattatgttttatcttccaagctactgctttttacttttcttcttatagtaagagttcatgaaaatattcataaagataacaaaggctacactttcaactatattccaaaatactgttccaaagcttaatgttttgtactgaaaatagtcccataccaatcctattaacagggccaaaataccagcgatgatacttctgtttctaacttggcgctcggttaaaattttatttttcataatttttaccccattattatcatatcgaaaaataggaaatctattaaccgaattttctattttttaatattatctatgtttatgttttttatgtctattttgtttggcgaaatctttaacagcgccttctacacatccttttatcataccacttccgctagggagcgcatcaatgaaacccgataaacatgatccacctacaccaagccagttagtgccaccacttactttttctaattctttataattcatttctttcatcataaaagttacctccttttttacaaatgtgatacacaagaaactgatccgctaataatacccacattagcaccaaatatagctccacctactgtaccaattggagtaccaaatgcagtgcctgcaatgccatattttagtccatccttcaacgctcccattccaatagctttagcacaatttgtgatttttctacggcgtcttgctttaccaccgttaccaccgaaaacagctgacagttcttcataagttaaagtttcaaatttgttcatgtttttcccctttataaaacttctaattacaattttcataagtgaattaagttttacctctcttcaacttacacactaataatacaaaacaatttaccttcattggcgtataataccgatttagcacgaaacaagatctatttggaaaatatttaccaaatcggccaagttttcgtatattagtaatttacaaaggattcttattaattgttacgctaacttgatattctgttttataaatccgaaaactagtaaaaacatagacacaatgcacttattatgagaatggctaacaaaaaaatcttctcatagccaaggctacaagaagattgccatcacattaatgcataaactgatacgcacgctctttactttaataaaacatgatcaattatacgactataacatagccactcaaaaccaaaaacttgagtcgaaatcaaataatcatttttagcatagtaacctacgaaaaaaatcacaagtttcataggtttctttgcgttatcttctaagtattacgatattttctattggagatatttttagcctattcgcaccagtatttttttcaatacttatctactagttattatctacctctatgaaaagaactttggaaaaacttaggattttccaaataaacgtctcgtttatgattaccacctttcttactgtataaaggtagcatgtgttcagtatcagttagaccaatatcatctacagaacctgacccacctaaaattccgcttaaaagtacttcatctttagaaataatgattcgtttcatctacttttcctccttagttttctttcctaatgaaatgcccaaaactaaactgattaagatactaatcattccaattaattgaccccagatattatccttctcacctgtagatggtaaagactgagtagaaccatttttaatagtgtcattttccaatcgctttaacttagtaattctattttgattgttcttaacggcactataaggcttgctttgcacttttactgaatcaaattgtttattttctttcacacttccgtgtttttcactaactgctgctagaataatattctttttatgcgatttagctgttttcttgaccttagtggctacgattttaggttttactggcttcttcacagttttcttcttagtttcagctctaggagccgcatactcttgattacctgtcgtaactttagtcagatctgcagtagagctagcaacatttgcagcattctcaaatacgctattttcaacaaagtcagtaatagcaacgtcattgctagactgtgtttgatcatcttcagctacagtcacttcaggtatttcattactttcagattcagtagtattatcatccttcggttgatccttaattactgcctgttccactaatttattagctgcatcagaatacaaaaagttatataactcttgtcccgtcttttctccaccgacccatgcactaataatttttccattaataaatctcattgtagttggagtacctggaataccaatttctttgaaggcatactcatgtgctccttcttcagcatcaatattgaaataaagcagcttacctttaacgatttcattgaaatcttttaaatcaggtgaaaattgtcgacagtagtaacatgttggacgaccgatatacataagatgttcttgattatttttctctgctagaagatcttttacttcttgcatttttactctatgaaaatcttttacattgttctcataatcttcaacagatacctcatcttcatcatcttcactatcttcctcatttgcattattaggatcttgattattagtattctgtgactgattattttgatcttcagaagctgctggctcttcttcctgcttattttgagtttgagctgcttcgttcttactactagttttctgctcagattcggaaacatttttatcatcattttctgttttagatactacttcacttttattctcttgagaagtattaccttcatccgcatgcacaatagtactattcatcatcaataatactgctgggctcaacattaacattaatatttttttcttattcatagatcttcctccgtattttttataactaagaaaaatatatcaattatcagctatctttttggttatcagacttattcagtacactttttgaccaaatcagttatcaaaataattggaatttgattctaactaaaaaagagcttttcagctccttttaattttggttaagaattttatccttaaaatattcaaaatatgtactcttacctgtaataatagttgcgttgccttccatcccatatttcaaatttttcttggacttggccttacagattacttcatagacattatttccgcgtagattaatgggatatactccaatttctttcacttttcctactaatctatccattgttccactagcattagctacctgaaaatacagtgtttggcctttttttattgccccaattttattacctgggaaataagtaactacattgaccgttcttttagccttaatcatcggaaacaagtgaactgtattctcctgtttatcatcaagatgaactagccatttttctctatttcttctaacaatttgtccttcatgatagtttctattggcaatattaagtgtattttgtggttctacaattccggtagatgtaactgtactttgtctagttgcaaagaaagaaccgactattaagatcagaactaaaattgccataggaataataatcatagttgaaaaattcttgaatttataggaatagtattcggtactctcatagtctttattattcataacgttgctcctaattctcaactaagttatagtaaaagccatgtttctgcattaatttctcatgacttccttgctcaacaatttgaccatgatctacaaccacaatattgttagtcctttgtgcaattgctaaacgatgagcaataaaaataatcgttttatcttttaatttcattaaattatctactacttttttctctgtaatcgtatcaagcccgctagtggcttcatcaaaaattaaaattttagccggtgacaataatgcacgtgcaatagttagcctttgcttttgcccaccggataaaatcttggcattttcatccatcttggtttcaaactgcagtggtaattgttcgatttcagactcaatttctgctatctgacaggctttcaatatatctttttctgtaatatctggtcgactacctaagagcagattttctttgattgttcctgagaagatgtatggtgtttggggaacatagtttacgtatgaccgtaagacatgcttatctactttagtagaattaaatccattaaaagttaacttgcctttgcttggagagaagaaatcaactaaaagtttgaccatagtagacttacctgagccactcatccctacgattgccaacttatcattgggttcgatttttaaattaatatctttcccggatttaaaattgaagtgcaacactaagtgttaaacaaaaaggccatgaagacctaaacttgaagtgacgaaaaatcaagaaaggaagatcttcatgaccaattcaaattctagcatttctaagcactatcatcaattaaccagcgtacaacgtggacaaattcaagcaatgctggattccggcataacttcccgtactgttatcgctcaagaagttggctgccataagtcgacaatcagtcgcgaaatcaaacgcggaagcgtcctgcaaagagacagcagctatttattgtatgagcactattacgctgatactgcacagatttattatgagaagcgtcgcaaaaactgctatcagcgcaatccattgaagcattatgctgtctttttgagaatgctctccagacgctttaaagctaaatttgatgccaccagcatcgatgagttcgttggtgaattcaaaaggactatgccaggctacccttgtcccagcacaccaaccgtctatcgctatattgatcagggcttgctggacataagcaatattgatctgcctatgaagctcaaaagacgcaggaacaagcgtcatcacagccatggcggtcacgctttgcacaagaagcatcttggcaattccattgaacagcgtcctaaagagattgaagacagaaaagctccgctgcactgggaaggagatctggttaaaggcgtcagacgcaagaatcagcctgctttaatgactttgactgaaagaaccacacgctttgaagtagttatcaagattcctgactatcgggcaagcacatgccaaaggctgcttcaaaaggagattgacagacatcctgcctggtttaaatcaatcacgtttgacaatggctctgagtttgcggatatgaccaagatcaagggctgccagatttactttgctcacccatattctccatgggaaaggggcaccaatgagaactgcaatggtcttttgcgtcaattcttccctaagggcaagagcatgaaagacaagtcaaaagcttatgttcaacaggcaactgatgccattaaccacaaatatcgccgaatcctccaatatcacacagcagaggaactcttcaagcaatatatctcttcataacctaactgttgcacttaatttgacaattcaggaattaatatcttttaatacatcgactccatagccataatgatagtcaacatgatgatattcaatctcacctgctaattgcttggcatccctaatctgagcatctttctggaactcactcttaaccatgtatacttcattcaatcgattttgtgctacattagctgattgtagagttggttgaagattaataatgctctgaagtggatctacaaaatacgatagtaatgcgttgaaggtcattaattgaccaatgctcatctgcccgttcattacaaccttagcccctacccagaggataattacattgagagataactgaatgaaggtctttaaagctgactgcaaagattcagttttactgtaacgaaaagatttcttgaggtaatcgacgaattgactatcaatcttacgataacgtgtttgttcgctatttaaagctttgattgtttcaattccttgaatatcttcaattactgaagaacttaagacagcattactctccatctgatcattattcatcttttcaaatttcttagaaaagctaagaatcaccactgcataaattggcaaagacagtagagtaatcacaaatagagtggaattttgaattgccaaaactattcccatcacaattacaattgaaagatcaagaaataatgaaataactgtactggcgagtgcgtcaataattcgactagcatcagagaaccttgaggtaatttcccctgttctacgagttacgaagaattccattggtaattcaaaaatatggcgaatgtattgtaagttaagatcaatacttaatcgctgacctagaacatccaatagaaaattttgcccgtaagaaaagatagagttgaaaacatatgctatcaataaaccaatagctaggatcgacaaagtttggtatgtaccgctaggaatataagtatcaattaagccttgcaagaagtatgagctacaaatactaatgattgtcatcaaaagagcagccaaaataatattagtgactagtttcttttgtttgaacatgtatggaaatagtgaccacagattttgctttttctctttgagtggctcaaaatcatcatttgggaccataaaaagggcaattcccgtccattcttgagaaaacttttctttagacattttcgttaaaccaacgctaggatccggatcagcaatcactaaataatttttggttgccttaatcacaacataatagtggagtaattcgccttgctttaagacgtgtacgatgaaaggatattgaatgtctgcatcaggatcaaacaaggacatgtcagctttaactgcttcagtttttagattaaatgcttgtgctgttttaactaagcccagagcggtagtcccttctaaattagtgcgggctgaatgacgtaaatgggctaaaaatactctagaatgatattttttaagaatcatagctaagcatgcaactccacaatctgattcgtctacttgtggtacataaattgatttatactgtagtaacatcttttccactcctcatattaagttgaatccattatttcatgattggaaaactaaatgtaaaaaaataccaaatcggttattctcattaccgattcggtattttagttttctaactagattgagctactcaactttaatattttcaaatttatctacaagctttttaaccacggctttatacgatctagaataagttaccatctgaccattatcaaatataataatgcgttccttcgtgtcaattgcactaatgttcttaggatttaccaaagaagattgcgaaacttttgccaagaatgggttttctttatcaatctgagtaatatttgccttatactcaacttctccattctcagtaaccatatgtactttatgctgtgtagtactgtgttcaatgaaaagtatatcgccttcggccactttacatacgcgccgaccaatcttataagtaaagtcacgttgactaaacttaattctgttagataaattatcgaaggcgttacgtaacgtttcttcgatacgttgaataatcttatcagacgacatagacttactaatataatcaattgcaccgatacgacggcgatacgttaatggagcgtacttatcgtacgccgttacgaagatgatctgggcattttcgtcattcttcttgatgaattcagctaaatctacgccattcttagctttagactctcgacttaattcaatatctaagaagtagataccattcttaatatcatttgtgactatgtatcctaccgcttgagcaaaatcgttagcaacaaacgtaacagattcatttaattcagcgtaaccttcattatcatctattaagtcttgaatagatgcattgatattcttagcaatctgattagctaaatctttatcgtcatcgcatacaatgattgggaacttactcatcctcttcaccatcttccgtatcaattgtcatataaaagtcgaaccagccgtcttgaattgtataagaaatagacatatcaggatatttactctcaatttccttaatattagctaatccaagccctttatggtctttcttagtagtaaagccacgttgttgaatttgactagttgagatatttttattttggattttatttctgatttcgaactcaaattcatctgggtcatcagaatagaccattatttggacttcagcacttcgaatatcatgcttttcggcaatcaatgctttactttcctcaattgcattatcgaaagtaatgccaataatacgtactagatcgagttcatctacatggtctggtaaattacggatattatttcgacattcaaaattatatggtatatccaaattatacaattctgttatctttggaataataatgctcttaattgatttaacgtaaatgtgatttaggtctttatatttaagtaaggctttagaatttaggttagtttcagtatatttatctagtttctgaattacttcttgaacgttaccttcttgcgcacttacctttaaagaattaagaatatttttgtaatcatgtctgaaggcgcgaagatcatcttcacttttttcaagataagaagcatattcttcaagctgatgctgctgttgctttaatttttcttgatcctttttatttaaaagtttttcttgtaccatcgtcatttcatgatatataaatatagcaaaaatagtttggataagaatatagagagaaaagaacaaagttaatggtgtaaaagatttgctttgaatatatatgatagagatgctcaccgtagaaacataggtataagctaatatgcctacgaaaattttattattttggtttgctagataattatatatttttccattacctagttttattgcaactatcatcattagtattagtaagaaacgtagtgataattggcctatcaaagtaaatgacataacctgagtgatcatatcagacacaatatcaactaataaatctaatgtgcatactaatattattgaaccaaatagtatttctaatgtattattttttctcaaatataatacaaaaagcaaagtttcaagtatatttgtgaagattacgccaatattacctatagacaataacaaccctaaaaaaatattagcaatacacaaaaatagaatctgtctctttttagatcttactcttgatatttaaaaaaaacaccatacatctgctaaactagaaaaaacattaagaaaaagaaataagactatcttttccatatattattccaaagttttttactcaagaaattaaaaccaacatgtgccgtgcttccaccaacaaccttagtcaattcttcttccttcaaaacagtctttttaacattttgcttcttcatgatatttcatcctttcatgattttatactcaacttgtttacacctttaatatatcatgtacttttaagtaaattaaaaaagataccaattcagtcatactttcgtaccgatccggtttcatatttcttcaaacgtaaacaactgacaattaattttcttagctaattcctgacagctatccgtaaagccagatttggaaaatagataataatgcttaagtggatacttgaagatttcactatttgtaatcaatttttctaacacactacgagagatcggttcattcttccatttacattcgccgaaatatccatcacgttcatcgtcagagaatcctacaatatctaactcaacttgttgatgtgttctcttatcggttccccaccaattgcccaagtggataaacggattaggaacaattttttcattcatatcctgagaccacatgaagtcttgactgtatttttcaaactcaggtcccatgaaatcagatagacccttttgtacttttacccaagcaagatcagttaagccacgctcaattagatcggtttgcttgccaacaaaggtataccagaagcggaacatcccgtcacagatacgataaacgatatttttgcttttactcttcttttgctcagtaaccggtaactttttctcaacaatacctaaatctatcaaattattcaggtacgtggttagcggaccagtttgtaagtgggcggattgcgcaattttactatgcttagaagcacctgaagctatcgcattgataatcgaattatagttagttggatcgcgtaattcctgttgtaacaagttattaggctcatcaaataagcgacctgatttactcaaaaagtttttcttaatattatccgcaactgacatgctgtctgacatataactcaaatattggggtacaccgccacaaaccgtattgatgataaaagcgtcctctttactgagttttggtaacatttcatgtgcttctgataatttaaatggttcaagctttaaggctaaagtgcgacgaccatatagtggactttggtagcctaagacttgtcgttccataaatgacatcgatgaaccacataaaatcaaaaataggttagtttctttgaattcatgatcaatgtaggattgcaacattgaactaattgtagggtaagccttagccaaataaggaaattcgtcaataactaaaattacacgttgtttttgagctaggtgtgtaatttctttaaagcattcctcaaaatttgcaaatttttcttttccaccctgatctgtatttttaaaaatactaattgcatcagaaaaacgttttagattatcttccgcattttcttcaagtgctacataataaattgactttttatcttttaaaaactcattgatcagtgaagtctttccaattcttcttcgaccatagatcactgtaaattgaaaatcattttcttgatacgcctgattcaattgctctaattcttgatgtctacctacaaacatagcgcactccttttcactacatcgtaatatactacattatattatactataacacgatatagtataacgtaatgtacgtgtattctatttttgtaataaaaatggccgttacttagagaaatagcgaagatcattaaattttaacatgctataataacaatagaacaagaataaaaagttttagcgtgcgcgttgaggtagctcctcaacttagtcattaacgtgtggctctgctttggcaaagcttttttgttatgttaataccctacaaaaaagaccgtgcatccctgcacggtcttttcatcttatcacatctattttctaacgtattcgccgttcttgtacttaaattcaatcttcttgttaggcaattgaaccgtaattctgcgatatacaggaccgaagccgtgcttttcaagcttaactttcacgctaccgtccttgtttaccttaaccttgtacaagttgtattcgcccttttggtacttaaagtcagttccgttatcttgatagtgaacgtacttaccctttttaccaaatagtctaaaggtcatactctcgtctggttcaccagagatgtggctaacttctttaccccatggcaagatagtgttcttcttgataaacagtggcaacttgccaattggtgcatcaaccaaaatcgtggtctttccagcatgttcaacaccattccagaaatcaatccattttccttttggcaaatatacggcacgcttggtttgaccttcttgaacaactggggctgccaaaatgtcctcgcctaccatatattcatcattcaagttatacacctgtggatcattttcataattaaggacaagtggacgcataattggcaaacctgtcttagtttcacgatagaattcatcgtaaagatatggaatgaaacggtaacgcagcttcaagtacttacggtaaattgacaaggttggttcgccaaatatccatggttcttgtgagcgagttcctagagccgcatggtttctgtacaatggactaaacaatgcgccttcgatccaacgagtcaacaattcaggtgttgtgtcagcaccaaagccaccgatatcagtaccggcaaagctgaatccactcatacctaagttacataattgtggaatcatcatttggacatgtgtccataaactttggttgtcaccagtccaaactgtggaaaacttttgcgttcctgcatatgctgcacgcgtaatgacaaatgggcgttttccactgaatttcttcaaaccttcataagttgccttagccatgttatgaccatagacattgtgcatcttcttatgagttgaagcttcttcttcattatggaagacgatattttgtggaatttcacccttgaaggatgcaggttcattcatatcgtcccagatacctgaaacaccaaggtcaactaagtacttgcagttcttagcccaccacttacgtacttctttgcggccaaagtctgggaagactgaatcgccaggccaaacttggtttacataaacagtgccatctggagcctttacgaagtagcccttttcgataccttccttgtagatcttatagtcatcatctttcttaacgccagggtcaataatcgtgattattctgaagcccaatttacgcatcttagctacgaatttctctggtgactcatagttatcttttctccaggtaaatactctgtagccgcgcatataatcgatatccaggtgtaaaacgtcacatggtaagtcatacttacgcaagttttcagcaatcttctcaacttgcttttgactgacactgtagccccaacgtgattgttgatagcccaaagtccacttttgtggcattggtacacgaccagttaaataagtgtagttagtaataacttccttgagtgagtcaccaccgatgatgtagtagtcaatattgccatcaaccgctgagtagtagtaatagtcattactttccttacctaagtcgatgtggttgcgataagtattgtcaaaaaagataccgtaaggatgaccattttttaatcctaataaaattggaatcgacttatacaaacgggtaaagctctctacttgcggatcaggattgtcagtattccaattatcataagcatagtggcgtttgttcaaatagccggttttatcacccaagccataaaattcttcgtcatctgctagtgacttgaccacttcataataatcggcgtcatgctttcccagtaatttatccacatcatggccttcagattcagccagcttcaaatgttcctcatccatctgtcggtcaattggggttcttttcccccgataatctacgaccaatggattgccttgttcatcaaagacgtcaattttttcatcatcataagcttttactatcaacttagccgtagctatttcaatatgatcgcctttatttttaactgtaaaatcagttttaatttctttatcgccttcgatagcataagaattgctagcattacctcgatcttgaaagaatcgcataatttccggtgttaacacggtcaaaatcattggtccattctcatagtttaaggtaattttttgtccatctttagtaaaatcagtaagttgattaatcataatttacctctaaaaaatcaaaagttatgtattcgctttcaattttaacacaataagctaatcaattgggtcataccagaaaaaacaccttcagaaatttttgtatttaaatacaaaaaaactgccttacggcagttttatttaatttattccattggaaaaatcttatctggattcaaaacataatttggatcaaaaacatgcttgatctttctcaaaagttcagtgtaatcatgaccatagaaatcctcaaaccaatctttgcaggcataaccaataccatgctcgccagacatatttccatccaaagctttagctgtcttataaagttcggtaatcacataatgactcttttgctcaaactcttcgtcactcattgcatctgagcaaagataaatatgtaaattaccatcgccggcatgaccaaagttaggaattcgcataccaacctcttgttccaattcatcaactctatgcaaaacatcaggaatatgattaattggcacacaaatatcaacttcatccatctttggcgtagacttttgaatagccaaaagcaatgcttcccgacaagtccaaatcttctttgcttcctctgaattagcatctaaaattaccgcatcagctgctttaaacttcttcgttgctgcaagggcaagctttaattccgcatccaattcctctttagttaaagaatcaagccctagaataatgaagccatcgccatttgcaatcgggaatttttcatcgtaatacttttcccagagactaatgacttttctacccataaattcaacggttgttggcactacaccagaagccaaaattgctggtactgatttaattgctttatccaaattaggaaacggaataattgcattgatcgattgtttaggacgtggatataaacgcatggtaacttcagttactacacctaaagtcccttctgagccaatgatcaggtcttttaacgaataacctgatgaggacttaactgccttagcgccaaatttgtaaagtttaccatcagttaaaacaaccttcaattcgcggatatgttctcgagtaacgccatatttaattgctttcaacccaccggcgttagtatccacattaccaccaattgtagcccaatgcattgctggagctggcatataagtaaatggtttattggctaaatattcttcaatatctttcaaccgaatacctgcttgcacagtcatcgttagactttctggctcgtattccaaaaccttattcattttcaccatatccagtgaaatgccaccttcaacggttaaattgccacccattagaccagtcgaattaccacgcggaacgataggaatatgatgatcgcttgcatatttaacaacgttttcgacttcttcattagtttcaggttgaattaccaagtaaggcattgctctaaccgtcttaaattggtcatgatcccaatgaacagttggcttagtaatgaatcgctctggatctgagataaatttactcaaattatctatatctgttgcagttaattttttaaagtccatctttgacacttctttccaaattgaaacatcctatattaactaatgtatccgcttttgtaagcggtgtcaaaaacaagaactgaagatttttttatctaaaaaagcaaatttccatactacctcactttaaaatgcgatagtatcgactttcatttaaataactattacacaaaatatgaaaataaaaaaactgccttacgacagtttctagttaaataaatccgacatcttagttggaatattattgtttttcacaaaatactttttaaaagtaggtaaatctgcattttcttttttcacatacatatcatgtaaagcccaaaatgcagtgattaacaaattaacgcccaagacaattaacataccgattaaaatatatactaagtaaagcattgatctatcccccgctatatcgtcacttgacccagagtcgcatcttcaatgaagtatctgacgaaagcttgattgaagctcatgccctggccgttgtaaacatgccactcttcgcgtttggcacctacagttctaatgattgaaattactgtgcaaattaccaaatatgcgattagcacgttaaaaattattttcattaccagcatgtctacacttcctctctgtactactcaactaatacactaatatttattagtcaatttgtcaacatcttttagtatttacttttttctccccaggtataaaaagccatagatagctggtccgatcactaccgccccagctatagaaactataatcactgcaataaagcgaggcatagcaaaaaattccgagctaaatttcatacaggcccaggccccaaagaaaaaaatcgcccagccaattaaaattgaaattagcatatttaaacctgaaaatttaggtttagagtttttattgttcatcaagttttctctttcataaaaatattgtgccacaaattgaaggtcaataaacaaaagtgacagattcggtcgttttttagacttatttggtaaaaaataagggagattaagtaaaatatggcgcttaatctcccttttgaatcaataattatttgcccataagacctgaaaaagccattcctaaggcagcaccaccacatgcacctgctttagctgatacgggacgagcataactagtaattgcataatgaaacttcatcacatcatgtgacaatttaccctgccagcttaatggatcaagaccaactcgaattaagttgcagacataattagctgattcaccattttctaactcatgctttgcatcaagtaggatttttctttcttctggcttagtatcttcatttactagtaggtcagtaatattacttaatagccattgttttaaatcatctttattttcttgatacatttttatccctctttttcgactttttcattaatatcaggatgcatccctacaaccattttagaatctttcatgttcttcatcgattcatttattttaataaaaaactctgcaagtagcagagctttttacctcattgcagagttacttatacatatacttagcacatgcttttttagaatccataccattacgaatcttcaaagctaattcaatcgatacatccgcaataattgattgtgggtcaatcacattgtaaggatgatctggtgccttttcctgagctaacgacaattctgtacatcccagcaagattacgttgcagccataatcatcatgcattttttgcaagatctggtggtacaatttaccatcaaccattcccttttctttaatatcggaataaatgagcttattaaccatcggttgaatttccggaccacctaattctgcctcacggtgaaccgcatgaatttcatccacatacaaatgatcatagattgacccttcagtcgcaatcaagccaattttcttttcttgtgggtatttttcaataaattgatgcactgctattctcatcatgtgtaaaaatggaatatcagtcaatgcagccaaatcatcataaaaatagtgagcggtattgcatggcatcacatagaagtctggtcccaatttggcttggcccagaacatcgtcacgtaaatcatagaaaaagtttggtttagtatgatctttaatataagccgttctatcaggaatttgtgcatcattaaccaaaatataatttaaataatcttggtccttagctatttttacacggtgattaattaaacgaacgtagctttctgtggcaatagttcccatgccgccaataatactaaagaagtgtttcactattttcacttactttctaaagtgttcttcttgaccttccaactcattaattacctgctgtgcaaccacaatatcagatggatatggggtatttactccgcgaattttttggaaagcgtcagcccccttaccacagattagcacaacatcatctggcgtagccatggcaatcgcatcatgaatggccttcttacgatctaactcaatagtaacgtcgcacttagagtgatctattcctgaatcaatttcttcggcaatactctttggatcttcaaagcctggatcgtctgtagttaaaaatgctttatctgcgtatgcagtcaaactttcactaaaaccgggacgacgtgacacgcctttatcaccaggagctccaacaacaacaataattttaggatcgttgaattcgttacgcataaatctcattaaagccatcattgaggccttattatgagcgtagtcaactacaaccatgccgtgcttctttgttctctcggtttgcatccggcctggaatagtaacatcgcgaatacccttcgcacattgatcatggttaagtccagccaagcctgctccaataattgcggcagtaccatttgactcgttgaaatcacccagcatctttaaagtataatcaccattaattggtaatttacgtgccttatcactagcacaaactaaattgaaccgagtttctttcatatctaattgttcagaagagaatctgaaatcaattggctgcttcaagtctggattttcaaaattatcgcgggcaaacaaataaatactatcggggttggtagtagttgttgcggcagcgtagacttcatcaaagtgtgcagtttcagcgttgataatacatttacgtgagttaacaagcaattgtaatttgcagtgcaaataatctgcaaaattagggtgttcgttaggaccaatatggtctggactaatattcaggaaaaagcctaaatcataagttaaaccgaagacacgatttttcttatatgcttgactagaaacttccattaccaagtgagtcatgccattatcaacagccgttctcatgtctcggaataagtccaaactctctggtgtggtcaagcttgacttaaagctatcttcaggcttaggaccgaccacatcattaactgaagaaatcagagctgtcttaccaccatttgcttgatcaagcatccctttcaaaaagtatgctgatgtagtctttccctttgtaccagtgaaagctacaacaaacaagtcatcttgtggaaaacggaagaaagcagctgacaaaagagccattgccttagaaacatcgcgcacaattaaagcgtgccttccttttccttctggatatggttgttcagctacataacaaatggccccattgtctttagccattgacaaataagttggtctaaagcctgctcccttgcagaagaacaatgtattagtttgaatatcgcgtgagtcataagacacatagtccattttagtagctactgtatcttgcactgcgcttgacttgagcaagtgatgctcttttaagatcaatatacaggtatttaaggaaatactcattaacttttctcctcgttgtatttaaaacatttcagtcaaaattataacacagctagtgtgttggtgacgctttcttcggatcaagtggcaaacgaataataaaactagtccacttttcgtttgattcacagcgaattgtaccatggtgtaaatcaaccacacctttggtgatagataatcccagaccagttccgcctgtcttagtatttcgcgaagtttctacccggtaaaaacgctcaaagattttatttaatgatttcttcggaattggtgccccattattttcaacgcgcaactctacttcacgtttgttgactaaattggctaccaatttaattttagttgcccctgtaccatacttgaaagcattagaaatcaaattattgtaaacgcggaccagcttttccgcatcagccttaatcgttagattctttggccgcgcttcaatctctatttcaatgccatttttttctgcttctaattcaaagccggccgctacctgctccaacattgaataaatatgcaaatcattcagatttaacttagtattggtcgactttaaagtagtatattcaaacagatcgttagccagtgctttcatttgttctgccttagtataggcaatattgacatactttttctgatcttctggcgaagtcactcctgcttttaacaaaccaagataaccaataattgatgttagcggcgttctgatatcgtgcgaaacattagtgatcaattcatccttagattgctcaattgcccgttcttcattaatcgaatttacagtactatcaaccaacgaattaatcgaatccactactcgttgcaattctggtcgtacccgaaaattaatccgatgatcaaaatgaccattagcaatatagtgaagttccaaaataatgtgacgtagctgcatttggtgatagcgtcgaatcaagcgccagtacaaaacaaccaagtcgcccactcccattaagacgatgaatacgttttgccaggaccagagatgatagccacctgcaaaagtgatcgtcttttttagaaagtagattccgttgaccaggctttcatcctgcaaaatagctaagtgaatcagaatgataattgataaatttaataaaaacagaaggacgaccgttacgaccccttctgcaaacaattcgctcttttcggcgccagttagcttgacgcgttcttttttcatcttatgcctcgaccttgtaacctacgccccaaacagtttggatgacatcctcaccatcagtggctttttgaattttatcacgaaggtgtgacacgtgtaccatgacagttttagctgaaacaattgattcttgttgccaaacacgttcaaagatttcatcagctgaaaaaacacggttagggtgactagcaagtaagtataagataccgaattctaaggcagttaattggatagtcttaccatcaatagtcttaacttcatgtgaatcacggttaattaccaatggtcctacttccaaaatatctggtttttcattcttaacttgcttttgacttcttctcaaaagtgaacgtacacgagccattacttcaagtggattgaatggcttagaaacatagtcatcagcaccagtgattaagccttgaatcttgtccatatcaccggttttagcagaaacaataataattggaatatcggagtcttttctaacttccttaattacatcgattcctgacatatttggcatcatcacatccaaaatcatcaaaacgatatctggcgtagtggtcaatttagtaattgcttccttaccactatatgccgcaacaggttcatatccttcatttttaaggtagatacttaatagttctacgatttctttgtcatcatcaacaactaaaattttcacgaggaatgttcccccttcttgtttattattctctgtttttctatctacagtttagcagatatcatatagaatattttacacattttagaaaaatatactgctttcattatcctttttaaacaaaagctaaaaaaatacacgtttctccatcatgaaaaacgtgtattcattctatttactttaccttatcatcatgcaatttagtttcgacataaacgcagacgataaatagcaaagcaaaacagcagatcttaggtgctgttgcataatcaagcatgctagcaaaaccgaataagataccatctggaacaacccaccaggagccgatcgaagaattaaaggtatcactaactgtcgcaaagaatgcaattaaaatcgttaaaacaagtaaaactgaagttaagatcattcccggccgaccaaaatctttaaaaccatgatcccagtagactatcactccaagcagtaccaataagattgataccagccatagactaccctttttcataataaaggccttctttctgcccttatcctaacacgattaagtagcagctgccttgtttaacgcttattgaatttccttcttgccagtgtagagttcatagtagtaacccttttgcttgattaattcatcatggttaccatgttcaataatatgaccatgatcaagtaccaagattaaatctgagttaacaatcgttgacagacggtgagcaataacaaaactagttctaccagtaagcaagttgtccatcccggcttgaaccattttttcagttcgagtatcaatacttgaggtagcttcatcaagaatcattactggctcatcagcaatcattgcccgcgcaattgacaacagctgtatttgcccttgtgaaaggtcgccgccatcaccatcaatcacagtttcataaccgtgatcaaggtcatggataaattcatctgcgtgtgataacttggctgcttgataaacatcgtcatcactggcatctggattaccaaagcggatattgtccataattgtgccagtaaagagatgggtttcctgtaaaacaattgaaagtgattttctcaaatcatcttttttaatgtttttaattggaataccgtcataagtaatcgttcctgaatcaatatcgtagaaacggttaagcatgttagagatggttgtcttacctgcaccggtttcaccaactaaagctaccttcattcccggtttggcattaatggaaatgtcatgcaagatttgatgatctggtacgtagctaaagttaacatgatcaaaaataatatgaccacgaacttgaaccttcttggttgagccatctttttgtggtacattccagtaccacttactgccgacttcatcgtttttcttagaaagagtaactgtaccttggtcagcttctgacttttgatcttccaagttgaaaattctttctgcaccagctaaagccattacaatagagtttaattgttgcgaaatttgggcaattggcatactgaattgcttagataactgtaagaatgaaccaatggcaccaagtgaaagcggagcccaactattaattgcagcagcaccaccaacaaaggcgatcaaaacgtaaagcaagttacccatgttacccataattgggaataaaattgtagcgtaagtgttagccttacctgaggcttgacgcaactcatcattatatttgtcaaagccttccttagattgtggctcatggctgaagaccttgatgaccttcaaaccattaagcatttcttcattataaccattgatttggcccagcttcttttgttggacttggaagaagtgacttgatctaaccgttaagtagcgcacaattccaaatgataaagcaaaaataatgaaggagaacacagtcaattgccaactaagtgaaaacatagcaactactacaaataataaactcaaagctgagttagtaaattgtggaattgactgtgaaatcatctgcatcaaggtatcaatatcgttagtataacgcgacatgatatcaccaaattcattttggtcaaagtatgaaattggcaagctttccatgtgaacaaacatttcgttacgtacacgatattgcactttttgagctaaaacacccatcagcatgttaaaaaggtaattagacaaaaaaccaatcgcatagatcccaaacattaccgcaattgcagtagctagagggccatagttaggaactttttctttagttaaaggcacaatataattattgatcaaacgttcaatgaataacgagccaataacgttgctggcagctgctagcacaatagtgatcatggaaacgatgagcatccatggacttgtactattaaccagtttcaataggcgcaataagattttggttctgctaccctttgtttgatttttacttttttccattgcttgatccaaattgctcacctactttccttgttcttcctggaatttagcgattgaactataaagttcgttagtcttcatcaattcatcgtgggttccgatagcttgaatttgaccatgatccatgacgataatccgatcagcatccttaattgaaacaattctttgtgaaataatgattttagtagtttctggcatatctttagccaaagacgttctaatttgtcgctcagtactggtatcaacagctgaagtggagtcatctaagatcaagatcttcggattcttaagcaaggctctggcaatagtaattctttgcttttgcccaccagaaacgttgttaccaccttgttccaccattgtgtcataaccatctggcatttcacgaataaagccatcagcatgggcgattttagcagcggcaattacttgttcatcggttgcattttcgttaccccacttgaggttatccttaatcgttcctgtgaacagcacattcttttgtaaaaccatcgcaacgttatcacgcaaggtcttcaagtcatatgacttaacgttgtgtcctgcaacccgaacggcaccagaagtaacatcataaagacgcggaatcattgaaaccaaggttgacttcgatgaacctgtttcaccaataatcccgattgtttcacctggcctaatgtgcaaattgatatcttttaaagcatcagccttgtccgcaggttcgtacttaaagctaacgtgatcaaagataatttcaccattggtcaaacgtttcaatggcttcttaggatcttcaattgttggttcttccgtaatcactgaccactggcacctgagataaccaattgcgtagtaatcatagctaaaatgtttaaactaaacaaaactgagtttgaataagtaaacattgaaattaattgaccagtttgtaaactaccgccaaccacttcttttgcaccgaaccagcagattgacagcgttgaaatattcaaaacagctgcaactactaatgcgttcaaagacataatcttttgtgcagtcgcaaacaacttgtaaataaagcctgatgacttcttgaattctttaatctgcggttgttcttggacataggtcttaacttcacgaataccacgtacgttttcacgcacaacctggttcattcggtcataccctctaaaaatcttaggaaagtatggataagctgttttaataatcaaacccaaagcaattgcaaaaaccggtcctaaaactgcaaagattaatgataaacgcggactaataataattgacataataattaaaacgatgaacatcattggtgctctaacagcaattctgatgatcatttgatatgccatttgcacgttgttaacgtcagtagtcaaacgtgtaactaaactggcacttgaaaagtgatcaatattttcaaaagaatagtcctgcatatggtagaacatgtcttggcgcaagtttgcggcaaaaccagcagctgcatgagctgagacataactcgcactagcgcctaaaattagcgaaataacggttaacactaatagcaatagccccattttactaatataggacatatcccccttcataattccgttatcaatcaaaattccgaccaaatatggaatcagcatttcaatgataacttcaccaataacaaacattggtgagagcaaagacaattttttatattgcctaattgatttgctcaatgttttgatcatagagacccacccttctattcttttattcaatctcgcaaataaaaagataaatggatcatctccatttatcttttttatctatattaagtttaagtatgtgcttatttttacggaaattcaattaacatgcttgcaaaacaggtaaattatttatgttgttgtggccttggtgcaaatgcggaaccaacaatattgtagtgctttctgaataaataacgtacaccataggcagccgccgcgataacgatgtcagctactgctggtaaaactgggttgattacgcgcaatgctgggatttgcaaaatccacatccagacaaacaaaacaactgctatagccaacattcttaagatcagcttaaccaatgaaggacgtttaccttgctgaggcattagccaatcattgtatttaaccatgaagatccccattaaaatacctacactggcaattgtcagaatccccatttgtgaattatacggttggttcttagtttggaataatgcaaggataccacataaaccaacaaaaattgctaaataaagcaatgcgccatcaaccatcaactgccaagttggtgtagccactggctttttcttaggatgaagcatttgttcagccttaattgctggtgaagccaggtaaagcccattggctggttgcccatgacgttgggcaataataatttcactgagcaagccattagtcatcgcaactgcatcagcacgtgacattgaaccttgtttttgcagttctttttctagacgaaaaacatagtcactgttcttgttactcaacttttcacgcaaagcttttggatcttcctgcttaattttttcatcctgagtatcaagctcagcttgcttctttaatttagcttgtttttcagtgttaatttttgtttgatcttgttctctctttgtctcttcagccattcttactcctagacgttaaatctaaattcaataatgtcaccgtcttgaacttcgtaatctttaccttcaagacgcagcttaccagcttctttaaccttttgcatagtttcaagcttgtctaaatcatcaaatgaaacaacttcagctcgaataaaaccacgctcaaagtctgagtgaataacaccagcaacttgtggagctttcatccctttgtggaaagtccaggcacgggtttcaggaccaccggcagtaaagaaagttctaaggcctaagatatgatatgcagcacgaatcaaacgatccaagcctgattcttctacgccttccatctcaaggaattctttcttttcatcatcagccataccagcgatttcttcttcagttgcagcagaaatacctaagcattctgcaccttcgctttcggcatgcttcttaacaatttggtaatacttgtcgctttctggatcagccattgagtcttcagcaatgttagcaacgtagataactggcttggaagttaacaagaacaagcccttaacaatcttttgttcatcttcgttgaagtcgattgaacgagcagcattaccttcttcaagtactggctgcaatttattcaaaacagccatttcagccttggcttccttatcgccttgttgagcaaccttctttaccttattgattctgcggttaacagcatcgaggtccgcaatagcaagttccaagttaatagtattaatatcttcttctggatcaaccttaccagtaactgaggtaatattgtcatcatcaaaggcacgaacaacgtgaacgatggcatcagtttgacggatgttttcaaggaacttgttaccaagaccttcaccttttgaagcacccttaaccaatccagcaatatcggtaaattcaaaagttgtgtgcacaatcttcttagcaggaatcaattcttgaattcttgccaaacgcttgtcaggaacttcaaccattccgacatttggttcaatggtggcaaatggatagttagccatttcggcaccagccttagtaatcgcattaaacaaagttgacttaccaacgtttggtaaaccaacaataccagcagttaatgacatttgttgtcctctttttctaaaatcaattttttatttttacttacttgtctattttatccaaaatttggccgagcgatacgatcttttggcacatattgctctttttttgcattaaccggatcattcgccttagttaatagcttttttagcttccggttaaactcgctgcgcggcatcatgactatgtgcccacaacccatacattttaatttgatatcagcacccatgcgcaaaatttcccaatcattagtctgacaagcatgaggctttttcatttgaactgtatcagccaaattataaacaatttctttagccatctaaatcaacacctaacaaatcaagaatccggttcaattcttcagtcgaagcaaaatcaatcgataaatgacccttacctttttgtgtttctgaaatattgacgctagagccaaacttattagccaattggctttcgctagcccggataaaggccgatttcttgacggtctttttgctgcgaggttttttagcgttcaattcactgactaccgcttcaaccttacgcaccggcatcccttccttgactactcgcttagccagcgcatcaatcttttccttatctttcaaacttaaaagcgttctagcttgtcccatcgacagttcaccatgttggagtaaacgcttagtcttgctaggtaaagtgagcaaacgcaaataattagcaatatatggtcgcgacttacccatccgcttcgaaacttcttcttgcgttaagccaagattcttctgcagcatttcataagcttgcgcctcttcaagtggagttaaatcttcacgctgcaagttttctagaactgccacttccatcatttggctttcgttaaacttgcgaataattgctggaatagtcatcttcttagccaatttagaagcacggaaacgacgctcaccagcaatgatctcatatccattaactgattcgcgcacgataattggctggaaaacaccattttccttaatagaatccgacagttcttttaagctcttatcatcaaatctttttctaggctgataaggattcggccgaatatcgcccaaatcgagttcttggacttcttctgcctcttgaacttgaggctcatcctcaaataaggcttcaagaccacgacctaggccgcccttttttcttggctctttacttcttgagtctcttgtcatgagcttttaacacctcttttgctaaatcatcatataccttggcaccacgagattttggtgcatattctgtaattggctgaccataacttggggcctcagctaatttagtaattcgaggaatgatggtcttataaactttcttgctaaagtaggactgcacttctttaaccacttcagcacccaagttagttctggcatcaagcattgttaacaaaacgccttctacgccaagatctttattaaaatgcttttggactaaacgaattgtgttcaaaagttggctaagtccttccatagcataatattcactctgaactggaatcaaaattgaatcagatgcagtaaaagcattaattgaaagttgccctaatgatggcggacagtcaataaaaacaaaatcgtattgatcgctaattgcatctaaagctgactttaagcgtgtctcccgagccatcattgaaattaattccgtttcagcaccggacaagttgattgtggctggaaccatatctagctttggcgttgaagtatggtgaatagtatcttgaataggaatttcgtcaatcaaaacattgtaaatgtcctggtcaatctctgatttttcaattcctaaaccagaggtagcgttaccttgtggatcaatatccacaattaaaacgcgataaccacggtcggcaattgaggctgctaaattaatggtcgtagtggttttacctacgccacctttttggtttgcaaccgaaattacatttaccatattgttcatccttccctattacttccttttcaattcaattgtgatcttataatcatccggatctttattttctgttactttgactttaattcctgagtcttcggctaacttaaccgccttcttaatggtgttaatttgtacctttaagtctttaggaactcggctaacgacccgcttagcttcttttttagccttaggcttagggttaaagtaaacatccacatcttgcacaatctcttcagtttgtttaacgtttaagccttttgcttcaatttctgtcaaaacgcgatcttgatctgcattacttaagccgatcattgcacgaccatgacgagcggtaattttgccagcaatcaaagcttgctgcacattatcatccagcttcaataagcgcaatttgttagccacataagattgagacttacccatatttttagccaaagcagtttgagtcaaatcatttaattccattaaattagtataagcttttgcctcatcaattggatttaagtcttcacgctgtaagttctcaatcaaggctaatgaagcagcttgatcatcactcatatttttgacgatcgcaggaatagtctgccagcccaagcttttagctgcacgataacgtctttcacctgcaataatctcatattgctcgtcatcgccatcttcacgaactacgataggttggagcaagccatccttatcaagtgtttcagctaattctttaattgaatcatcagaaaattcacgccgtggttgatagcggttaggaaaaatcttgctcaattcaagatcttgaacctgtttattcttaggaatttcatcatcatgatgcataaaagaaaataatgacataatatacccctttctgtttaatgaatcggtttgcgccgcggggtgcctgcttgacgtggatactttttaggtgttgctttgactttttgaactaagattagagttcgttcttcttcgctctcaggtagagtcaattcttcttccttaatcagcttaccgcccagcaattcaagagctttttgaccatcatccaattcatcttcggcttttggtcccttgagggcaataaagtaaccatcttttttcaccaaaggcaagcaatattcactcaaaacactcatccgcgcaaccgcacgagcagtaacgagatcgaacttttctcgataaagcttattttgaccaacgtcttcagcgcggccatgaactaattcgacgtctttcaagtctaacttagtaattaagttctttaaaaaagtcaatcgttttgccaaagaatcaacaatggtaatcttcaattctggctgcaaaatcttgagcggaattgatggaaaaccagcaccagcaccaacatcacaaagagtggcaccatctttaaaaacatcgccaaaagtaaacagcggcgtaatactgtcataaaagtgcttaaggtaaacctcatcttcttcggtaattcgtgtcaaattgacatgctcattaacttcgatcaaataattaaaatatattttaaattgttcaatttgttggtcagttaatttaaaattgtgttttgatagttctaaaataaatttttcaggattcatttttcacccgtgaaaccgtgtttcacacctctaaatttaacgcaaaatgcattgattagtaaagatatttcatcttatcaattatgaagtatttttactcaatcgtcaaagttttgccgcccgcaaaatagggtataataaggcgcaaaggagttaaaaatatgattgttactttaattgttttagcttacttagcatataaaacatatttaggctataaaacaggctttacacgctatatcatcggtttaatctgttccgccattgtctttatggttgccattttcatgcaaaatccatttggtaattggctatacacacaatacactggagaaatgattaagactaactccactaacaacgtggaattaatgattgcacgctttgtcgctttctttattgttttcttcgtgggcaaaatgatcatgaagattgtcaaaagctggattcctaacaaaaatccacatgcgactaacttaggcagtattctcgacaatgtcttgggtgctctagcctccctaattgctagttattttgttgtttatgtagttttgtccatgttcaatgcactacaaaatccatggtttatgcagcaaacaattgattctagctttttgaggtttatcatttacaacacaccggggctttcaaacggtgtcttcaataatatctttaatattggcaaaactgtgggataaaatatatcaaaaaagatctgcttgtatcatactgagcagatctttattgatatgttttaactaaattaatactacatttatgaaccaacattcgatatacttattagcgcaggaagttttatgagcggcggctggttctcccccccggaggtgaggcctatgggctacattgatgaaagggttccagccatgtcggtttacgagagtatctccttgatgcttttgttcggtacatttttgttggctttgctgacatatattgaccaccaccaaaaataaaaaacgccgctcaaacatactttggccagttattgagtagcgtttaacgtaaaatttaacatttgaagccgccgctcttaaagcgggctgcttggagtccctaggactcctttttctttagtcattatagcatatttcactaatcaccgaaattatcatattcaatatgttcatcattataaacaaagattgcaccaattcgatcagggttatcatgccaaccctttagtggcttgccagcaaagaataatcgtttgcattcaatttctgcttcaaccgatgttttggtaaaagtagtcacaccagctaaatcagtctttacaggatacccggttctaggatcaatcaaatgatgatactttttaccgttaactactaagtagcgctcatatgtcccactagtaacggctgagcattcaggcaccataactgacgtaatattgtcgcctcgcggctgtttaggatcttgcacaccaattgaccactggccactaattcttttaggcgaatcaccaactaacaagatattaccgcccagattaataattcctgcttcaacgccatatgcacgccacaagtcacgaattcggtcggcaatccaacccttagcaattccacctaggtccagctccatgcccttcattttaagaaaaacagattggtcactgtcatttaaaaccaccttaaatgggtcagttaacagcattctatctttaatttcttcatctttaggaacatgtgcgcctttaaaaccgatatgccaaagcttaacaactggtccaatcagagcattaaagccaaaattctcacggctcttttctactgccaatttaaccaaaccatacacagcactagagacctgtaccggatgttctccagcagcatgattgatatccattacttcagattcatctcgattaacggtaaaaatatcttcgtaatgatcaattaaatcaaatgatttttgcaatagatcacgattttgagtaccaaaaatctgcaatgtaattgaagttcctaaagcatgatgatcaccaaccacctgctctaatgctaaatctttaatcataattatttctcttccaaatataaatcacgcaacgcctcacgtagttctgtcgttacgccaattttttcttgtaaaaagttatcgaaactaccaaaattctgctcaatagcgattaatgaagtatccaaaaaagcatcagaaactgaacctaaaattcgcatattagcgcgaaaacaaagattctcgccctcttcttgcatttttttatctcttttggcccgatagttattaagcatataatttgagtacaaatagtcctgtctaattgtttccatatctacgccaagcagatataacaagactacagttaccaatccagttctgtcttttccttctgaacaatgataaagtacagcacctttttcagtattggccaacagctctaaaattttatgcaagctatgttgagcgtgttctttcaatacatgtgacttgtaacgctcacacatcattctaaagccagcatactgatcttgacgataagttgcgaatacttgggttaagtctttcttaccgcctttggtgttgtcatcaacagaaattggaatacagaaatgctctacgccagggattttgctgtctggacaatggtcacattcagttggtgaacgcaaatcaataatcttagtcaagccataattgagcaaaaactcttgatcatgtctcgttatgttgctaatcttgcccgttcttaataaccgatgcatcttgaccttacgtccctgatagccaacatatccgcctaaatcacgcggattacaaactttttctaatggcaaaatatttggtttcattaatttcatctctttattaagtattttgataaaaaagccggatagtgtccctatccggtaattttactatcacgtggtaagtcacgcaaaattatttgttagcttgttcaacaaatttaataaagttagccatcatagcatctagttgcttaatataatcttcattggtcaaatcgccagtttctttatcaaaattgcttgcagcaccgccaattaagatttcattgcctggcaaaacattggcactcatgtctggtgaaagcaagatttcacgagcatcttcttgcgcacgactagatccttgaataccgtatgaagtaccaacaactgcagccggcttcatcttcatcacattaggaccagcatgtgaacctaaccattcaagcgcactctttaaggcagctggaattgagtgatcatattctggtgtagccaaaattacaccatccgcattcttaacatcctcgatccacttcttagtaacatcatctggctcatcagttctacagaaaggcttaagttgatcgatttctttaacttcaatatcagcttgctcaccataacgcttagcaataaattttgctaaaaaacgattgaaagaaaatggagcgtttgtaccaacaattgctaaaattttcatttaaataagccccctacttagtaagttgtgcataccaatcatcaacttcatcaaagaagtgattcaaaaacttaagtgtacctgcatcggtcaagtcgcctttatcatcaaattgttttggtgccaaacccatcataaattcgtcaccagcaaagacatgagcactaaaaccaggtgcgcccaaaatgctcttcaagcgagtttgcgaacgagacgcaccttgaggcattggtgaagttgacacaataactactggcttatcatggaatgggtgaacagaactagaaagccattcaagtgcactctttaaggcacttgaaaccgagtgttgctgttctggtgaagcgatcaaaaccatatctgcatcagcaatttttttacctaaagctaatacgctagcaggagcatcaacgccttctttatacataggcaagcccttaacagtcgcaaagtcaaaatcatacttatcgcctaagtccttaataatgactttaagtaatttttcgttaaatgagttatcggcattggagcccgataaagctaataccttcataaaaaccacctttcaaaaatcctcttaattatcattatagactaatgtagtttaatttatgtcattttaattttaataacaacaagaaaaaacgccttcgataatgaaggcgccctctactgaatgaaaagcacaaatgattggtgaaatttctatgccaagttatccttaagcgaagcttcttcgtcggcagcaaacattgggttttcttgagtttcgctgagacgattgttaagcatagcatcgtggatttgagcattcaacacattgacgatttgagtttggctgaagcttgcaatctcattaacaatcaatgcagccatacctgtagtagaaatccagttagcaattacgatgtcatgaatcttttgatcatcataatcaacatcaggatattattccttgaacttttcagttccaagttccatcaaagtgtcagcaatgatcttgctaccaaacttgccatcaacgaacattgctctaaacaagttaacatgagcttgagcaaaatcaatgtatgacaaatccaagtcaattaaaggttcaccaacgtacttttgttgtaaagtatgagttctcaagtcattagagattcttctcaaaacttgattgcgaagatcatccatgttgttaaattctagatacaaaggttgggttgagaagtgtcctgctttagcaatgctacgagcagtcaaaccttcaataccatccttgattgccatcttgtaggctgtatctaaaattttgtctttactaatttctttttttcttgccattttaatgcacctcaatcattgtataaaacatgtgcttttcaatacacttgttttcttttcttcatcactataatatatccaaaaaaataacaattgcaagtcttatacactaacttattaaaaaatattatcatcgcttaaatagcgatgagccgttgtctcctgtaaattgatcataatgtgaagaagccatttcaataactgcttgcttgtccaatccttgtgcagcacaaaacgaaaagaatgcagcagataaaatatagccgcgttcacgatcatctgtcaggttatctgagaacttcatattaatcgaatgatttgcataatccgttgtcaattcaatcgatttattttctggtttactactcattctattgcaacctcttttttgttctaaaacaaataaaattaaaaattcccggatttaaaattgaagtgcaacactaagtgttaaacaaaaaggccatgaagacctaaacttgaagtgacgaaaaatcaagaaaggaagatcttcatgaccaattcaaattctagcatttctaagcactatcatcaattaaccagcgtacaacgtggacaaattcaagcaatgctggattccggcataacttcccgtactgttatcgctcaagaagttggctgccataagtcgacaatcagtcgcgaaatcaaatgcggaagcgtcctgcaaagagacagcagctatttattgtatgagcactattacgctgatactgcacagatttattatgagaagcgtcgcaaaaactgctatcagcgcaatccattgaagcattatgctgtctttttgagaatgctctccagacgctttaaagctaaatttgatgccaccagcatcgatgagttcgttggtgaattcaaaaggactatgccaggctacccttgtcccagcacaccaaccgtctatcgctatattgatcagggcttgctggacataagcaatattgatctgcctatgaagctcaaaagacgcaggaacaagcgtcatcacagccatggcggtcacgctttgcacaagaagcatcttggcaattccattgaacagcgtcctaaggaggttgaagacagaaaagctccgctgcactgggaaggagatctggttaaaggcgtcagacgcaagaatcagcctgctttaatgactttgactgaaagaaccacacgctttgaagtagttatcaagattcctgactatcgggcaagcacatgccaaaggctgcttcaaaaggagattgacagacatcctgcctggtttaaatcaatcacgtttgacaatggctctgagtttgcggatatgaccaagatcaagggctgccagatttactttgctcacccatattctccatgggaaaggggcaccaatgagaactgcaatggtcttttgcgtcaattcttccctaagggcaagagcatgaaagacaagtcaaaagcttatgttcaacaggcaactgatgccattaaccacaaatatcgccgaatcctccaatatcacacagcagaggaactcttcaagcaatatatctcttcataacctaactgttgcacttaatttgacaattcaggaaaattaaaaatttaaaaatttctattataattatattacaaaatcaaaagaattagaaagcgtgtttttatcaatgaaagtttcaacttggcgctcatcatgcacctcaattttaatcgggaaaaaggcctctctttctggcagtatcatcatcggtcgtaatgaagatgctaagactgcttggcctaagcatttagcctttaatccacatcgagataatgtacagaaaaaccattttaaatccaaagacaataagtttgaaatggatttaccaacagctagctactcttattcttcaaccccagaatggacagataagtacggagtgttcgaagaagacggaattaatgaatatcatgtagcaatgagcgccaccgaaagtgcctacgcaaatgaccgagttttagctgttgacccctttgatactgacaaaggaatcttagaagaagcaatggtcaccgtagttttaccttatgttaaatccgcacgtgaaggcgttcagcgcttaggagaaattgtagaaaaatatggtgcagcagaagctgacggaattctctttggcgatcgtgatgaagcctggtacatggaaatcggttctggccatcattgggttgcacaacgaatcccagatgattcctacgctattgtcgccaatcaactagctattcaagaaattgattttgccagtgacgacttcatgtattctcaagacctgcaaaaatttgtctacgacaataaactctggcctaaaaatcagccattcatttggcgtgatatttttggcactcatgacgatagtgacttacactacaacacaccacgagtatggagcggtcaacgtctgcttactccatctgtagcacaagaacccgaaagctttaacctgccatttattcgcaagcctgatgcaccaatttctgcgcaagacgctcaacgcgttttaagcgatcactacaacaacaccgcctatgatttaaccaatcagaaaaacagaaataatgccactttcagacctatctctgtggctactactcaggaatcacacttgcttgagttaaacggtgaaaacatgattcactggctagctatgggtgtggctgcgcaaagtgtttatgtgccattctatcctcaaggcactaaggtaccaaatacctggaaaaatggaaaagaaacctactcaccaaattcagcttactgggtctttaaactggctagcgtcctggttgatcgtaattggggtaagtacggcaccgctttaagcaatacgcaaagtactactaacgaaaaattgcttcaaattagacagcaatatgatcaaaaattagcacaagaaaaggatcaagaacaacaaattaaattagtggatgaagccaatgccaaattagctaaaactgctactgatgcttataaagaattgatcgctaaactaatcaccgaacaaactggtgactcaccgttgcgtttccaaatggatcctaacttataaacaaaaatgcctcaatgaggcattttttcttactattttttcttagtcattaagccgtccatcatttcataaatatggtcggcgtatttttctagccgcggatcatgcgttactagaataacggccttgtcacgctttttcgctaaatctttaaacaattgtcctacttcttccacattttgcgtatctagcgaagcagtcggctcatcggctaacaaaatatctgggttagcatataaggccgtcgcgattgctactcgctgctgttgcccaccagataattcatttggatacttattaaccagcttttcaatccctagctgcttgagtaagccttgcaatttatcttgcgacaaattattttgcttttttactttatcaatcaaagtaaattgctctttaactgtcaaaaatggaactaaattataagcttgtaaaacaaagccaattttattcaagcgtagttctccactttgcttagcagaaaaattactaatgtctcgaccattaatcaaaatttcacctgaagttggtttttgcaaggacccggcgatcgtcaaaaatgtacttttaccggcgcctgaaggccccataattaaaaccacttcacccttattagcctgaaaattgatatctttcaaagctgcaactttagcttcgcctttaccataaactttattaacatcttttaattcaattactgccattttactcaccaattgcctttgctggatcaaccttcaaaattgatctaatcggaatcaaactaccaataatacccatgactagcatccctaacgtaccactaatcataattgctggcgtaaaagtcattggcacagctgctggtaaagttaaatcagttaaccacatcaagataatcgcaattacaacaccaatagctactaaaattatggattgactgatcgttgcaccaactaaagttttacttggaattccttgagcccgcataacggcaaaattatgcattttttgcatagttaaaatatataggaaaacagcaatcacgatcaaagaaataacaaataagaatccaatcatcaattcaaaagttaagttttgagccgtatatcctggaagcttattaataaaggcttgaattgggtatgtcttggcatccttataattgaatttataattgctattctttgaaacaactgcagaagcggctacattaggagcgaccatccgcagttttttccaagttttcattgagccataaacaattggcgcaatattaatcttggcgttatttacaaaaccaacaattttatattttttcttagagccattcagagaaatttgatctccaagcttgtagcctttgtctttgaaactactgtctactgtaatctgattaccattctttgcttttttcccagcaattatatcttgatcttgataaataaactggtcttttttgatgcctaagaattgagctgaaattgagttttttccctttttcttaactacaattcctaattgaccaataattgcttcattcttgccaatttttgcgttttttaaatcgtcttttgtcagaattgactgactcatgctgatattggcatttttatttaaaacaatcttttgcgcattccaattttcaattgcttgtgtattctgacttgctaacccaacagccaaagatgacaacataaaaattaagtagctgatcaaaaagatcatcaaaataatcaagccatagcgcaatttttcatgcttaatttctttcagtgctagaaacataactacatcccctttgctagtatgtccaggctcttcttatagcgcgccaagttcttttcctgattttcgggatctgataagcataagttgataacttcatgactaagtaccatggcactccacaattgtggccccatattcaacaattgtcttgaataaattttgaaattatgtggtatcaagtactcattttgcgacatatgcaatttcatcattggttcatatttactgtattgaactttatcaataaacttaactactcttgcataaaaatgattaggatcaaatttttcattaggactcatcccagcatgaatgtcttcaatagcgatgtgatacatataaacatatgcatcaattaaatcatcaaaatatttataaaatgctcctcgagcaatgttggcattcttaacaatatgtgacaccttagcatctgctaacggataagtgctgaattcttctaacaacaccgcttcaatacgtctacgtttagcagacggtaaatttttaaaagtttgcttaaccattttgttttccccttttccaacacaaatgacgacttgtcatcaattacttatatcatagctgattttgacgagttgtcaatacatatacacaaaaaaagaaggcctctgccttccttctctaaactaaaactcgattatagtagtacaacctagcaacaccatcacggacgctaaatttgcttaatgcacaattatttggcgtatctatcttgtccatgtcgccattactcaaataatgagctgccatcattcgaatcaaacgaccatgtgccactactaataccttaccttctggatatttttgatatatttcgtctaaaaagttagcgcaacgtgcttcaaactctccgtagccctcaccatttttggcatatttaacatagtcgcgagtaacttttccccatggatcaacgacatccggatattccttagcaatatcatccatcttcttgccgtcccaatcaccaaaatcaaattccagcaaacgtttgtctaaatttaatttctttttacctttagtaaaaattttcgcagtctctactgctctcttcattggactggaataaacaacatcaaatttattttcatcaaacttagcggcggattttttagcatattcacgaccaaattcattcaagtctgcgtcaacttgtgcgccctgaattcgattatctttattcacgtctgtttgtccatgacgaataaaaactatttccattttttacatcaccttttcttaaaatcatacccttatttaactaatctttccatttctttactgtttttttagcgttttgaaatttaaaaagcttaaaatataaatagataattagaaaggggaaacattatgtcccgcgttacaattgaaagagatggtctcaccttagtaggagaccgcgaagaaccattcggcgaaatctatgacatggctatcctcatgcatggttttaccgctaaccgcaacactgaattattaagacaaattgccgatgatctacgcgacgaaaatgtcgctagcgtccgttttgactttaatggtcatggcgaaagtgacggcaagtttgaagatatgactgtgccaaacgaaatcgctgacggcaaggcaatcttagaatacgttcgcaccgatccacatgtacgtaatattttcttagttggtcattcccaaggcggtgtaattgcatcaatgcttgccggtctttatcctgatgtgattaaaaaagttgtccttttagcaccagctgctcaattaaaagacgatgcacttaaaggtaacacacaaggcgcagtctatgatcctaaccatattcctgatactgttccactagtcggcaataaattaggaatgaaactaggcggattttatctccgaaccgctcaagttttaccgatttacgaggtctctgcccgctttagtggcccagtatcagtcatttatggtactaatgaccaagtagttaaccctaaatatgctaaaaaataccatgatatttatgaaaatagcgaacttcatgccattacggatgtagatcacagattcactggtcaatacaaaaagtcagcatcagatttaactgctcaatttttaaaaccattattttagcgccgagtaaagtcgaactcagtacgaaagacgtaatgatccttagtacttacgtcaggttcaaattgaaattcaaaatcattaaagtcctgcaaatctgtgggattttttatttgcttctcggcaatgtagcgcaccatttcaccacgagccatcttagcgtgaaccccaacggtcttccacttaccattttttagttcctgaaagtcaaccgtaattaattgtcgtccttgactcaaataaggtttaaccaaacgtgtatattgcttggaagccaaatcgataactatattatcttcttgaaataaattttcagcgatatcactgccccagaaataatacaagctataatcacgaaaaccaaccattttagtatttaattctaggcgatatgggcaaacaccatcaaaaggccggagcataccataaaatcctgatagaatccgcaaattcttttgaatatagtcaagtgcaggttgtgtaaataaatccggagccatatattggtattgaattcctgaaaaagccaaaattgcaggggttaatcgttcatccaaattcatattttctagttgcaatatgctttgcttagtcacattttcactagcatgccaaaggtcttttaactgttcatttgaccttgacttaagaaatctttctagaattcgtgtcttatccaagaactgcggttttgactgaattggaaatgaatcacgatcaattttcataatttttgcaggtgcaataataattttcatttttagattttgttcctttacggtaaacttaaattgtgattaataagtcatgtggtaataagtcaaatgaaaggcgatgatatttgttctttttgatcataaatttgagtatatgaaactaagccttggtaaaggttgatttttttaatgttaaacttttgtttacttttaaatttagaccaatttttgaaattaagacctcggtgtcctgtacagtttgtcatctttgagcaatttaaagataactcgtactaattttcttgcagttaatgtgcaagcacgtttatgcggcgagtagacagcttcatcatacttcttttggtaatattttttgaaaacaggatcatgtaatcttgctagattggcagcttcaatcaagtaatatcttagatatctgtttccagtcctggccattggagtatgttcgttgctgtgatctcccgattgatattgattccaggttaggccggcatacttagccagctgttcttctttatcaaagcgatcgatacttccgatctcagcgataataccagctgtataggttttgccaataccgggaattgattccagaattttgctttctggtaatgcatcaacgatacgatcaattgctttttctagatctttaatagattcattaaagctttgaatcatgttgtaatgaacagaaagcactgcatcaattgaatcagtcattactttgcctaagcgatatgaacctctaacagctttcttaattgctttagccaaggtatctggatcggaaaagcgtcctctgcctttaacctgtaagtaagaaattaagtcttcggtaggcatatccgcgatctcatccagagttttactatcggttacaatagacatcattgtagcaccgaaaagaggagtattaatcttatctttatcgacagtgattagtttattaacccgataatataaagcttcaatgaagtgctgtttggtacgagtcagttcttgaactaattcatatctggtacgcgttaaacgctctaaagcaagatagttgtcttgtctggcaatgcttactcgataatgtccaaagcttagatacaaagcaatgtaataagcatcgagaggatcagttttactttcttcaaagactttatgaaacctgctggtttctttggggttaattacatcagtctctacattgagcttttgtaaatcttcgtcattttggaaaaagtaagcaggatgaaaactgtaaatagatgtagcttccatgccaataatgatttgatcatagtgtttattttgagctagatctaaaatttgttttttcagttcactagcaccataaagatcattgacaaagctatcgttaattaagcgtttgttttgatcttctgaatcaagtgcaacgacctgtaaatctttagaactaacatcaataccgacaaataatttcattggaaatggcctcctttctttcaaatttctgatcatagattttgatcttcacatgttaacccctaattacagttcttaagttcaatctcgccagtataagtattcactggttgcttctttgaaagctgcacctaatcccaattgctcaaggactagcaaaaagaagcaatcaatacagcatgtgagttagagcataaaggaactgtctgggtggcagacttataaagcagacaaaactgcaggaggtgataacctagaccagttgaccaaagccaatgacaattagaggctaacatgtgaagatcaaaaagcaaatactaatttgattaattatcacaatatgactaattacaatttatataatacgaggaggaaaaataatgaatcctgattttgcaattgtcttaaattatcaacttaatgataaggctgatgccgactttttagtaaaaacagcccgtaatatcggtgctcgtgcagtgatgactgacaggcaaactgaagatttcaaaacagcttgcgctaagtatactatttttttagctaatccagaaaatagtactgacttaactaaggataacgtcattgataccatggtcaataaccgtaaagctggtaagactacaattattaatgtgcccgttgaagcaggcaagttttctgccgcaactcaagcaatgctggatacgatcaatgattggatgcaccaattcggtcacgccttcaacgaaggaaaaactagtgctttaaccagtagcgatggctttattttagaaaatcgccacgcaaattaccaaaaatatgtcttcttacctagtcctcttcctgacaaaatcgtggtagaaggcctagtcgaagaacctaaccgggtagaatggattgaacatcgaactgatcttgattttaactataaggatcaaaaattaactattaacttagtcaaaccagatgatgagtttgcttggcaagtgttgcgaattcaagcccaccgacctgaagatgacattttagaaacgaaattttagtaaaaaggcgttctttgtagcagaacgcctttttacaaccttatgtaattgctatttctattttcaaaaaaatttattcttgcttaagctttaactactgaaccattatcaaaaaattctctaaaacgacgtgcttctttatccagagtaatttcatcattaacttgcgataacttatagccaacaaaataaggtggcgcttcaaaacgtgtaatatatttagcacaaataccgtcatcattacgcggataaaagaatagattataagaatcgcagcggccattatacatgatatttaacaaatacttggcaccactttgaatccagtcagcccacaagtcaatgctatttttatctaacaagttaatattgagctcagtgtagccttgaacggggtgttcagcaatgttaacttctaccccacttttttcaaaaagggtctcaccttcaaaattattcgggtgaatatatttatagccatcttcatgttcaaagccaactatctgcatatgcgggtgaatcaaggaaccacctgaatgtggaccatagttcttgtaccaaacaattgactcatattggtcactagcctgcactttttcaaaacaagctagcgcaaaatgcatcaacttgcgattatgttcctgcgtataagtactaatatcgccgttatgatcactagattcaattagtacagtctgccaggtatcgcgcaaggtcgggaacttattcttaagccaaatcatgtcatcttccttggcgtaaatatcagttaaattttcaacatcacaaaatgggcaaacgtttttcttcttatccttacgataagattgcggtttgcctttagcaatgctcatttgaaaaacaagtggatcattagtcatatttattcctttttttatttaaaatagtttaaaatctaatgggtaaagttttactataatgtaaaatattttgtagctttactagcataaaaatacttgttatactttgttaaagcaaacgtttattcgaaatttatcaagagacgggttttaataatgcaatctagaacagaaatgagaaagcgaaacaatcacaacaatctctatcttattattattggcataattgtcgtaattgcaattatttgtggctttgtcattcataatcaaagggtagctgctgaacgtagccagcgtgaatatgcttctacccacttcaaccctaatgtaacaatttatggtgtgcaagtaggcaagcttactgttaacaaggcgactgctaagatcaataaacaagctgataatgtcgtctttttaagaaataaaaagattattgctgaaaaagacgacaaggttcaaactatcagccaagctgaagttaaaaatattttcactaagcagcatactgatttgccaagcaaacaaaaatacgttttcaaatccgccaaaatagatgaagcaaaaaagagtttgcaaaaaatacaaaatgctgtagtcacctataagatcaatggccaggaattcaagctaaaagctgatgacctaattcacgaagttacttacaaaggtggtaaatataaattcaccgatgtaaaaaaactgcatgctaaaatggaagcgatcgatcaagaagtcaaaactctaaagaagagttataaatttactgttcctactggtaacaaagtcaatggcaaaacgattacggtaaaaaacgaaagctatggttggggaatttatgtcaagaaggctgtggctgcagtagaaaatgcttttattaatggtcaagatgttgttggtggtagtaagtatatttatggcgagggttatagtacctatgctcatggttatggcaagagcaatcatggtattggtaaaaactacgtcgttgtctccatcaaaaatcaggaactatgggttgtccgtaaagggaaagttgccgttcacttaactgacgttgtcacaggtactgaaaataagagtaacgctactcctaaaggtgtttggtatatcatgtacaaagaatcacctagcgtattgcgtggttataacgacgatggctctaagtatgcctccaaagtacaatattggatgccatttactttgagcggctgtggcttacatgacgctagctggcgtagcgattggagtaagtcagcctatcttactggtggctcacatggctgtgttaacattcgtccagctgaaattagaagtgtttggaacaacgttttaactaacgatgctgttatcgtatattaaaaaataaagattaatcgcctacttcaattgaagcgggcgatttttttgcgtaaaattaacagaaaagatatagatttttgaaaggatcaaatatgttagtcatcggtattatttgcttggtggttgctgccatttcttactttaaataccttagtgaaaagaacggacaagctaaccaaaaacaagctgaaaacaaaaatgaggcaaaatggcagcgcactttagcaatcattttcctcgttttcggaattttattaatcggttattggattgcattacgctaaaaaagacgtgaattttcacgccttttttaaatataattgattaccacattacccatattagctcttccctttaaaactaaggtaggaccgccgccattgctttttcctttaactattacattaccaaggctaatgcttaattgattatcaatctgccatgataagggaacgtagagatttacatttcccattgaagcagttagattaagcacgactgtatcacctgctgctttagcatcatcaagatagatattggcattaccgaatgaagtttcaagattaattgactgtaaattttgtgaatgaatataacgtgaagaatcgccagccatcttttgattaattacgatattgtcaccatcttcaatcacatcttgaacatgatgatgtgttacttttgtctctgtatcagcatcgtcactatcatcgtcatcattccaatgaaaactcttcttgataacaatttccggatcttttttaaaaagcaagctcaatcccattgaaacaagcaaagcaataaacaaaatcatccaagaggataagaactttttaatgcccaggggacctgcataagtaattactaaaaaagcaattgagaaaacggacaccacaatgctcttatcaagcaagcccttaattaagcaagccacaaaaatgactgtcaaaataattgtccaaacgctaattttgaagcttaataagcctaattgactgatcaccaaaagcgcagctgcagcgattagtcctactccccacaaaattcttgcaaaactgtttttcattataaagaccttctttcatctaagcatgtgcgtaattctttgtagtatcgacgggatgcatatacagttttataagtatcatgaaactgtatcttgcaatctgaaatcgaccgagttaaaccataaatttgatctaaattaataattgtcgatttggaaatccgcatgaaacctgcgcccaaaatattttctaactcatacaatttatgtttaaccaagtatgccttatcttgtgtatgcaaaattacctgcttggcatctgtttcaaaaaacaaaatctcgttcagtggtaagtagtaagaaacattgtttctaaaacattcaatctgatcattgtgttcaataccttgtaatttcttataaagctgctctatttccggagaaatatttttagctttaataatcagttcatcttctacggcatctggatcaatctcaagttttactttcatgtttctcactcccttctgaatctgatatttatattaaaaaatatttcagatagcttttccatagttttgaactaagtggtaaattttggcttctaagtggcaaaaaaaataagacgacctctgtcgtcttattgcttattatcaatgtaaactagtaaaaaatgttatcagtccaaaaataattcctggaaaattagccgtgaatagcggccaatctttcttttcaccaagaattgcataaagtacccagatcgtgcaattaattgcagcaaccaacggctgaaccggattaccataatttccgttcaaattattaataatttgcggaatatatgaaacatacatcagtacagataataccgacccaatacgtccaatagttaaaacagtttttcggtctaatcctttgaattttttcaacaaatcgctcctttgtgcttcattataagaaaagctagagtcgattgcaaaaatcatactttagtggacaccttccattagcacattaattctcttaactaaaaagaacattattaccgcaaaggctacactgaccaaaccaacagccatgaaatattgtacttcagtgccagttgaatagaacttaacaatttgtgcattcactgcttgtccagttgcatcagccatgaaccacatactcatcatttgcgaacgatatgcattaggggccagcttggtcgtaattgataaaccaattggtgaaatcaacatttcagcaatttcaactaagaaccatgaaccaactagccaaaatggactaaccttgcctgctgtaccataaagcatccctggcaaagccatccacatataagatagaccagcaaaaactagccctgctgcaaacttgcctggagctgttggctgctttttccaatgttcccaaagccaaacgaagattggcgttaaaatcataatgaataatgggttaagagactgaaagttggctgctgtaaagtgccaattaccaatatgaagcacggttctttgagcggcaaacagagctaaaactactgagcctgattcttcaatgccccagaagatagctgcagcaaagaacaatggaatgtaagccttaactcgtgaacgctcaaccttagttacttttgaactacgtagcatcatcacaaagtaataaattggcagtgcaattgctaaaatagtcaataaagtaatgacattgtcaacgttcaattgaccaaagccggccattgcagctaatacaagggcaatcaccacgaacccaataactacccacttaataatattaagcaagtcacctctatcaataggatcattaggcgtcaaactttcaggagaaaggtattttttaccgccccaaacatattgcactaagccaaagaacatcccgattgcagctaaagaaaagccggcatggaagttcatttcattaccaaaaatatgaaagccaaaaccttgtgctgcccatggaactaaccaaggtgcaagaaatgatcctaagttaatcccaaagacaaagatgctaaaacccgcatctcttctgcgatcttcaactgaataaagaccaccaaccatgtcagatacatttggctttaataaaccagtaccaaccacaattaaggcaattgaagcatataacgccgttacaccggctggaagtgccaagacaatgtgacctaacatgatcaaaacgccgccataaaagacggtttttcttgaaccccaaacacggtcagacagccagccaccaactagggttgataaataaacaagtgaaccatagattgacatgattgatgcagccgttgtttggtccattcccagaccacctttggtgactgcataatacatgtagaaaagcaggatggcgcgcattccgtagtaactgaagcgctcccacatctcagtaaagaataacgtggacaaaccctttggttgtccgaaaaatgctgtatttgaatcttgtttccccaaataaaaactcccttcttatcatagataagcacaatagaaataattataccacgaaaaaataaggatccactttttacagtgaatccttatttattaggtaattattgcttcaaattaattgattgccttagcaactgcgttgttaacagccactttttcagcttcgatcaagtcaactttaccttcaataactttaatatccatcttaatttcacgactaagaagtggaatatttacctttggttcaaagaattctttaaattctttaagtctagttggagtatggaagacgcgagtagttactgtgatgaatgttgtaaattccatgtcaccaccgacagtcttatcaagccaatcccaatcttctctaatccagtcccaggctgcttgttgaccatgatggttgctgagcaaaccagcataccagccacgcaagtcttgtggtttaattacgtcagcattttcaaaattatcaacaattaacgcaacttcggccggatcaatcgtactagtaattgcgctacgaagatcaactttgtatgaaggatcagcagttctttgatattccttgattaggttttcgattaggttgtggctaccaaagttctttacttcattgattaaaacatacggacgaacatcagcattcattgcctctaagttgtcttcattagcagtgaaaatctcatgagctgttttaattgagtctttattttcagcgtaaagactggcacttaattcatatggacgaatttgtgcatcttcatcgctttcacctggcttaactttccagcccaaacgagcaacttgaccagcggataacttgtcataaagcttctttaagtccttttcttgagctgattcaggttcaacaaattggcgcaacttagcagcagtagcgtaaagagcattaataactacacttgacttcgagtcagcaaatttagtcaaaagtggcacaacagcagcataagaaatttgtttaccttctgctaaaagacgtaagtcttgcaataattgcaatttggcaattggatcaagttcatcaacatgagccaaaatatcatcaagcaaagtcttgtcatacttaacgataaagtgcgagttgttacctacattaattctaagtgggtgacctgcttcactacgtaaattcttgtagtaacctaagtcgatttccttatcagacataatcttaggtgccttgaagttagcattcaacggaatttgccattgtctaccaacgtctttaccttcaccaacgaagaattgttgttgtgaaagctttaagtgaccatcgctactatcaacatatgcactaactactggataacctggttgctttaaccatgagtgcataatcttgccaatatcaaggtcagttgcggttgaaagagcatcccaaagatcgtcaccagtggcattaccgaacttgtggtggtcgaagtaatacttcaagccttttcttaaggcatcgtcaccaagaagtgaacgaaccataattaacattctagaacccttggcataaacaatggcactgtcgaaggcagagtcaatatctgctgggtcattgatttccatttgaattggttgaacaccgtcagtagcatctctagtcaaagctgcaggtgcttcactggtttggaacatttcccaaatatgccaatcaggttctagaccatcaactgccaagtattccatcatgttagcaaaactttcgttaagccataaattatcccaccatttcatggttactaaatcaccgaaccattggtgagccaattcgtgagtaataactgtagcaaccaatttcttcatttcaaagctagtattgtctggatcaagcagtaaatatgcttcacggtaagttactaacccccagttttccatggcaccagcactgaaatctggcaaagccaattgcaatgattgtggaagtggatacttagtttggtaaaattcttcgtaaaattcaattgcgttcttagcaacacccaaagcaaagtctaattccttaggcttgtgggccttagttgcataaacaccaattaagacgccatccttagtgtgagtagtctttgattgcaaatcaccaaaggcaaaggcaaccaagtaactagacatgcgaacagtttcttcaaagtggtggtagccgtccttgtccacttcaacctcaggcatattggcaagagcaacttcgccatcttcttcatcccacttaagcgcaagactaaaagtagccttagcttctggttcatcaacacatggaaaagcttgacgagcaaaagtagtttcaaattgggtaccaataatttgcttcttcttaccttctaactcgtagtatgaaggataaatacccatcatagtatcagtaagtggtgcactataagcaatttcaattacagccttgctgtttacaccagttgaaattttgatagcttcctctttttcaagtacttcaaaatctacctttttaccatcaaccttaacgctgtcaatggtcatatatttttggttaataaatactggattttcaattacttcaccggtaatcgttgaagtaccattaatttctttttgtttacggtttacgttaatgcgcaaatcatagtgttctggatggaaagtttcataaaaacgtttaactgtcattttttacctcctattaacagctcatttacttttaattctaccaaaataaagaaaaaagcgctcaaaaaaggctatttcttattgattgtaaggatgacgtttcagttctgtaacattgctgtcatattgagcttgtactatagaagcatagtcattaagaaataaataagttttgaaagaattaattaaatttaataaggaatgaatacatcaatgaataaacatgttaaatctactttagtaaaaatcttagctgccttagcacttgcctttgcttgtgttgcagttgcaaatgctttttctaccaatacttcaactactcaaactgttcaagctgcaagaaagctttcaaaagctgaaaaagctgctaagagatggatcgcaatgcgcgaatcaggtggtagctacactgctagaaacggtgtttgttacggcaaataccaattaaacattggctacttacatggtaacctttcacctaagaaccaagaacgtgttgctgataattacgtttacggtcgttacggttcatgggttaacgccaagagattttggttagctcacaactggtactaaaattaaattcctttaattcccaaaagctaaagaaaaccagcttagtccaattgactaaactggtttttgttttactcaaaattatcttgcttgataaaacgataaagtgcaatgactaaaactaagatcgagcacgccattcctacataggccattgttccaatgtggacagcattgtcagcagcttcacgggctacttgattttccattgcatagcccacaacccatttacgcattaataccggcgtcaagacaaaactaactgtactaataattgaagtcactaacgctacattacgcgaatatggttctttaaagaactgtgctaatacgcagaatgctggagcaatcatcaatagcaagatccacataataatccagcgcccagaacttgaattcatcatctgcgcactattagtggcataacgatatgagctccaaagcgatccaccagataaggtattaagcaaactcaagaaataagatccacgttgtccataaacaccaccattattggacagaataccttgaacaagttggaaactatcagttgatccagccgatgaaaaatcgaccgacacaacttgcttcatataagtagctaaaaacatggtaactgagccacctaattctagtgctcttaacatgcttaattttcttgaagctttcagatgaaattccagacttaaaactcgatcaggatggtgactgtgaccaatgataaaaatccctgcaatgacgatcaaggctaagataaccaatccccaccagaatttaatcatggcgaaaaataaggctaaaacaataatcgcaaccgaaatatatggtcggtcagaaaaaatattccaaaagttcaacttaacatgatggtaatttttccttgatgcatttgcgacattttgattaataatcggctgaggattactaatttttctgctgcgaaattcttcacgtgttgttgctcttgtcttagtataatcggtccgtgaacgatctgcgccggcttggccgtgctcttttttcatgcgatattcacgccgcgacatatgtgccataaactgcagcccccttctcaaagcactatagtagcacattatcacttttttgcttgaattaagaatgaaatttcaaagaaaatttagctttgttttgcatgtgctaaaatgaatattaataattgtgctttttttagaaagagataactttttgaataaaactaaatcagcaaaactgccagctggttggcatatggccttttataccttatggctcggttgctttatcactgggatgggctattcaatgacaatgccctttatttcactatttatttcagatttgggtaattattctaaactgcaaatcaatctttattcaggattagcttttgcaatgacttttattgcccaggcaatagtttcaccatattggggcagcctcgctgaccgcaaaggtagaaaactaatgtgtatgcgtgcttctggtgtgatggctttaactattaccctaactggatttgcacccaatgcaatttatattattgtaatgcgttttattcaaggttctttttctggttatattaacaacgccaccgctttaatggcaagtgaaacgccgcatgaacgtagcggctgggtcatgagtcaaatgatgacggccgggactgccggaaatttggttggaccgctattaggtggtgctctctccagcttctttggcaatatgtttggtggcgcctgggggtatcggattccattcttcattaccggtgttttaatgttcatcgtctttttaggtacaacgttcttagttcacgaagactttactccaatttctcgtgaaaagatgaagccgatgggcgaaatcatgaaaagtttgcctagcgtgaaattgattgtggtgatgtttattactaccatgttggtacaatcatcaaccatgtcaattgatccaattgtttcattatacgtaaaatcaatgatgcctcatggcggggatgttgcctttgttgcaggtgttgttgcggcaacgcctggtcttggaacgctaattgcggcatcgcgaattggacacaagatggatgaagttggaccgttacgcgtattgcgaatcggcttagtcgtcggtgcccattgtttgtaccaatggctttgactaattcgccttgggtactagcaggactgcgcttcttattagggattgctagtgcagggatgttgccagccgcacagacggtattaactttaaacacaccaagcgaaagtttcggtcgaatctttagttataaccagtcatttcaagcagttggtgccgtgttaggatcgttaatgggatcgactatttccggtttttcaaattatgcaacggtattctggctaactggatttacgttactgatcaactttgtgcttgttttgatttttgcttggggaatttcttatcggaatagataggttaagcatattcctaaagtatggaatttaaaaatgtaataaaagagctgtaaatatcacaaaaaatatttacccggatttaaaattgaagtgcaacactaagtgttaaacaaaaaggccatgaagacctaaacttgaagtgacgaaaaatcaagaaaggaagatcttcatgaccaattcaaattctagcatttctaagcactatcatcaattaaccagcgtacaacgtggacaaattcaagcaatgctggattccggcataacttcccgtactgttatcgctcaagaagttggctgccataagtcgacaatcagtcgcgaaatcaaacgcggaagcgtcctgcaaagagacagcagctatttattgtatgagcactattacgctgatactgcacagatttattatgagaagcgtcgcaaaaactgctatcagcgcaatccattgaagcattatgctgtctttttgagaatgctctccagacgctttaaagctaaatttgatgccaccagcatcgatgagttcgttggtgaattcaaaaggactatgccaggctacccttgtcccagcacaccaaccgtctatcgctatattgatcagggcttgctggacataagcaatattgatctgcctatgaagctcaaaagacgcaggaacaagcgtcatcacagccatggcggtcacgctttgcacaagaagcatcttggcaattccattgaacagcgtcctaaggaggttgaagacagaaaagctccgctgcactgggaaggagatctggttaaaggcgtcagacgcaagaatcagcctgctttaatgactttgactgaaagaaccacacgctttgaagtagttatcaagattcctgactatcgggcaagcacatgccaaaggctgcttcaaaaggagattgacagacatcctgcctggtttaaatcaatcacgtttgacaatggctctgagtttgcggatatgaccaagatcaagggctgccagatttactttgctcacccatattctccatgggaaaggggcaccaatgagaactgcaatggtcttttgcgtcaattcttccctaagggcaagagcatgaaagacaagtcaaaagcttatgttcaacaggcaactgatgccattaaccacaaatatcgccgaatcctccaatatcacacagcagaggaactcttcaagcaatatatctcttcataacctaactgttgcacttaatttgacaattcaggcaaaaaatatttacagctctttattattttcaattttttacgctaccatcttttcataaatgcgatacatccgattatcataagcgcacattgaaataaccagattatagcccgcgttttctttctgccacttttcaattgcgtcaactgcgatcttagttgcatcttctgcaggatagccatacacacccgtagaaatagctgaaaaaattacgctatgcaatcccgctttctttgccaaagccagtgaattatagtagcaagaagctagcatatgtgcatcactagtcttgccagcataaactgggcctactgtatgaattacatatttcgcaggtaaattatagccatgtgttatccttgcttcacctgttggacaaccatgcaaagtcatgcattcctcaagtaaccgtggaccagctgctctatgaatggcaccatcaacgccgccaccaccaagtaatgaattattagctgcattaacgatcgcgtcggctttcatcttagtaatatcgcctttaataatttttatgtctttcataattatgtccttagaaataaccaacatttctttctaccaccattctaacaccaacaacatcagttaggctcagaaagaatacaaagcatattgttatttttatattacgaacttgaattgatttctatctttagtatcctaatattaattttagcgttataggagcaacgaaatgaaaattttacgacgcagtttatgcatcatttcgatcaccttattttcttttgctttgagcattctcattcctagtgttcaagctagcaaaatagttttagatgatctcatcatatttttatatttaattggaatcgtaattctgggcattctgttgttgtctaacaaatttgattacctatcactcagtctaagcataatcttgctactcgcaactatcattgcttggatcagattcccaatgattagcattatttatactttttttatagcttatctgagtatatgcttactaacaatttttattgctaaaaggattaagaaataagtcactatgttttctaagaaagaactaaaaatcatcaataacgcattaattattatctatttgctttcagtcggcccaacattcagagactgtaaaatattttgtgtaaggatgaataattccttaaatttatttctttaaacattagaaaaaggagttcctttctcgtatgattggtttgaacaaaaaaacacatacagaaagaagaactccttcatgaatgattttacaaaaaatatagcacaagctctattcaatcaagacaaaataaacgatttattgcgcaaagagctacaacaggctgttaataacttgctagaagctgaattgactgcctttctgggctatgatccctatgccagaaatggctggaatactggcaattctagaaatggtgcttatttccgcaaggttgatacgcagtttggaccaattgaagtgcaagtgcctcgagatcgcaacggccagtttcatcagcacacgctgcctgactacaagcagcactctgatgttttggaaagcacgattatcaagctctactccaaaggcgtaactaccagagaaatcgctgacttgattgagaaaatgtatggcagtcattatagtccagcccaagtatcaaatatttccaagcagatgctccccaaggttgaggcttatcacaagcgcaagctaagcgacaagtttttctgtgtctatttggatgcgacataccttcctttgcgccgagaaacgtttgagcgtgaagcagtctatattgccattggcattaaacctaatggacataaagaagtcattgactactgcattgcgcctagtgagaacattgaagtctggacagagatgcttcaaaacatgaagtccagaggcttgaagcaagttgagctctttctttctgatggtgttgttggcatgaaagcggccttgaccaggacttatcctaaagctcattttcaacgctgcttggttcatgtcatgcgcaatatctgtgctaaagtccgggtggatgaccgcgaaaagatcatgaacgaattcaagcagatacatcaacagacaagccaaaaagaagctgcagctgtcttgcatgaattttatgcaaaatggaataaagcttatagccatgttatcaaaggtttgagggaaattgagcccgatctgctggtcttctacaattatcccaaacaaatcagagcttcaatttattcaaccaacatgattgaatcctttaacaacgtcatcaagcgtaaagctaagcctaaggcagaatttccaactgaacagtcgcttgatgtatttattggcatccaggcaatgagctacaatgaccgctatttcaaccgaattcataaaggctttggtcaggttcaggataccttagaatcctattttgattaaataaatgattaaaaaatcaatttacgagaaagaactatttacacaaaagatttgacagtttcaacattcatcttcggttttactaaatcaaatgatttcacaagtactttctttttaattgcaaatatcattttagtttgtttattcattatcattgctatcagaattgctaaaatcaatttcaggctaaagacacaatattatctactaggcttcatcactcttatttcaataatagaactagcctaccctggactgacattaaatgaacgcattagcaattattttgctatcggcaatattattttaggcttgctaactactaaaatctcaaagaaattagtttaaatataggacacaaaatgaaatatctgaaaacaccaagattaattaacagtattttgattactttacgtcatactgctataaattattgaattcttattactttaaaactacatcaggtattttcaatcattcaataaaaaataagactagcactaagccagtcttattttctattaatcaactattcttggggtgagaattgccatactgttccatcttggctacggtatgagccatcactcatctttgtaaatataaagacaacttttttcgtcctaattgtgtaaccgttttttgattcagttgtatcaactcggcccaaatcagccttaacacctgtttggggtggattatttttcttaatagaatatgcttgtaaaatttctttattaagtttagtcttcttttgctcagagttgttactatttttagcaactaaaatagcatgattctttgtaaaatacagatcaaaccaattacttaagcgattttctgtgttgtctactgttaatgttcgattaacccagtttttaggtaccgttgtttgattattgtagaaaaacattccaccaataactgctacaagtactgtaactactgcaattacggataacgtcattttctttttcatgatacgtttcctcttaaattcagcattaattatttggcactaagcctctcgaaatgagtcttacatttcctgaatacatgctaacccatcggtttctatttgttttaaaattgtgatccatccaggtactgtttctatacaaatagccactgtaggcaccatcattataataaactttagaaggtgttgtgttgagtaagttcattccatctcccctaccccaactactgtatctataaacattagatacatatttatgaagcggaccatttttgattggcccatacactttaacactctttgcttctcggactgtagtttctgaagcctgaacattctaactattggtagttaatactggagctacagttacacctacaagagtagcaaccactaataatattgactttttcatttttatttttcctcgtttaattttgatgttagtactactttcttacgaacagaagcaggtgcaggaatgctctttacatcatagctgtacaaatatcttctatataaggtagtagcactcttaccaactttttcacgcataacttttgaaagatatcctctataaccgttatactcaaaatagtgagtggcaccataatcataacttgaacctaaggtgatccaaattctcctaggtttatagtaatctgctcttagttttgaactcacagttgtttgtgtttcagctgatgcgctaacctgattcgaaactgtaaacaaactaacgccaactaatcctactagtgataatgaaactagttttcttgaaattgatttcatttttatacagataaagtaccttcactctctggccaaatcattattatttcctcctttcgtatcttgattatcccatgaaactctaatattacttctaaagttgcgtatcacaaaactactctttccaattagtcaccctatcttcatatcctagagaaataagcatggcttttacttctttagcttttgctatatttccttcatacaaacatttatagaaactcccacatgccttataaaaaagaaaatgattagtattgttcaaattcagtaagtaatctaaacaatttttaacctgatttccttttaagccataattacgccagcaataaaggtaattgatacaaatacttgctatcctatcttcatatttctctgaatatgaaaccttctcattgtaatgtttcaaaagaaaactaatataattatctgcttgttctgtagaaaaaacaggaatacagttatcgaataatcgcagcatatcaatattttctacccagttatcttttgcattaaattcagcaataattgtacttttgaattcgtcacctaactcatccaattgatttcgtacaattgctactgcaacaactactctgtacttaaatattctgctatcagataatttcattacttcttgcaaacattcttcgattttttctttatttgaaccattaaatgcacttttcagtttgttttcaagttttaattcaattaagtcctcttctgataaaaaatcatctttaatttgttccaaaaactgatctacatcaatatgatgggcaaacaagatcttaaatagactttctgcagaaattccttctattcctcgttcaattttagaataatggcttttatgaattattccttgaatcatttcatcttgcgttagtcctaagtgtattctttcttgtttcaaggcttcaccgatagtcatctttcatccctccaatttaacttcaactatactatctttttaattttctctccatacaaaaacgccttgctcaaaagcaaagcgttttttagcataagcaatatttgcattaacccttatcggcacctgcagtaattccgttaacgtagaacttctgcatgaagacgaacaagatggtaatagggatagcgatgattacacaccccgcaacgaattgtgcgaagtatgcggtcgcattacccttagctgtgtggaccatgttgtaaagtccatatgcaaccgtgtaagtcttagcatttcctgaagttgaaagaataatacctgagaaaatgaagtctgtccatggagcgatgaaagcggtcaaggcggtataaacgatcattggctttgaaagtggtaaaccaatgtgtaagaatacttgccacttagtagcaccgtcgatttcggcagcttcgtcgattgaccgaggaatagtatcaaagaatcccttagcaacgtagaagcctaagccggcaccaccaacgtaaaccaataacaacccgaagaggtttaacatgttaagacccttcaagatgtagtacaaagcaatcattgacatgaagcctggaaacatccctaaaaccaatgcaatttgtaagaatggttttctgaatgcaaagcgaagtcgtgataaaacgtaagcaactgaaatagttaagaaagttgaaattaccattgaaagcaatgaaataactaaagtattaatgatccagttaccaaatggatattgtggattagtaaaaataccaatatagttttgcaatgtgaatttttccggccagaaggtcgaaacgaatccagtatcattgaatgaaaaacttgctaagacgatccagacaatcggtaaaatccatagaatcgctaaaacaattaataggatataccgaaagattaatgagagccgtctttgatttgaatatgacttcatgtctagccctccttaaatgcattagtacgacgatatgcaatcagtgaaacagttgcactaataatgaagattaagatacccaatacggcactggcgttataacgctgttcctgaccgaaggtcaagttatataaccacgttaccagcaagtcagtcgatccggcaccattatacttactgttcattggtgcaccacctgtcagcaagaagataacattgaagttgttgatgttaccaataaattgttggataagtgaaggtgccatcacaaataaaatttgtggaaaagtgattgaacggaaaatttgtgcagcattagcaccatcaatcttagcagcttcaatttgatcttgtggcaagttttgaataatcgctgttgaaaccaacatagaaactggaataccgatccacatgttaacaagaataacggtaattcttgcaactaaaggtgaagcttggttatcaataaagtgaattggtgaactaatccaatgcaagttcatcaagatattgttcaaagcaccttggtagtccaagaactgcgccatcatcaaaagtgaaacgaattgtggtacagcccaaatgataacaaagattgttctccagaatcccttgtgcttgattccttttgattcaatcaaaagagcaagcaaaacaccaaagaagaaagtcgtagcagtagctgctacagcccagattaaagtccagcctaagactgggaagaaagtaccagctaagtcaccactcaaaacattgccaaatgcttggaagcctgtccatgagaaagcaattgggtgttgacgatcatagttggtaaaggccattgaaatcatgaagatcgttggcaaaatcgtaaagaacaagatacccaataatggaataaccatcaaggttgcgtgtaaccgagtatcaagcaaactcttaagttcttcaacgttagttggaatatggtccccatcacgcttcaaaatataattatgtctagttgagcgtaagttgacaatgtatagataaatgattgctacacataagatcaaggccaatacaccgaataacaaaatcaaaactgagtttgatggttgcttggttacataaacgccttgtgcggcatcataaacaacttttttggttttaatagtacctaatgtagctaatgaatttaaagtagggataccactgaggataaaccaaacaataaagataatttctgaaagtaagagtgaaataccttttacccattgtttgtttgccaaggcgttactacccattaagaagaatgataacttggtagcaatgtcaccttttgaccaaacctcgcgatatgttgctttaggagctacatgctttttctttagaaacataacttctccccttcttaggcaaaaaggctggacaatttttatttagcccaacccttgcttatgcttttagcaaattatttcttttcaatgttcttagcgagcttagcaagttgtggcttgtattgtgctggcttaatcttgccgtcgtaagtaccactgataagcggagctgcaccattccagaatgcggccatttgtggaagcttaggttgcaatactgagttacctggcttagccatttcgattacagcttcagcaaccgggtcactcttaacagcacttgagttgacagcgctcttcaatactggaatttgaccagcgttcttatgagcaattaattgtgacttcttgttagtaatgtaagcagctaaatctgaagcagccttagcattcttggtgttagcattaactgcgaagccttcaataccaaggaatgcttccatttgtacgctcttaccaccaacttcaatcttaggatacttagcaactgcgaagttcttacccaagatcttcttgatattagcagcgttccaaggaccgtccaaaatagcttgtgcgttacccttcttcaattggttcaaagcgtttgaagtttgcattacgcccttgttcttcttttgagctgcgtaccacttcaaagcattaataccgttttgtgagttgaaagttgagcccttaaggtcttcaccattcttaccgtaaagtgtagtacctgctgagaacattactggccacattacgtaagcgttagtaaagtcggtagctacaacaccctttgaagttaaagtcttccagtccttaacgtcgttagctgataacttagacttgttgtagtaaatggtttgagcttgttgtgcgtatgggaatgcgtaaaccttgcccttccaagttacaccctttgaagcaacatcgacatagttgtcttggatatccttagttgctgatggtgaaagtgggttaatgtaaccagcttcagccatttgacctaattgatcgttaggaacttcaaagacatcagcagcctttgatgggtccttaccaacgtctgtcttagcgttagctgaaccgttaggactttgaactacacgaaccttaatattcttgttcttcttagtaaagtccttagcaatttgcttgtagtaaggaacttgttcagtatccacccaaagagtcaagttagccttcttgtttgaattactgctacttgatgatgaattacttgagccgtttgaacatgctgctaatgataatgcagcaagaacagcagtactacctaaagccattttcttccaaatcttcatgactttttcctcctaaaaaatcaaaacaataaacaattcttaacaacagtagcttctgctacatatggttgtaagcttaattaataattatctgtactgcgttttcagtaccagattagttaacaatcgccttggtggaatctttatcaaagaagtgagctttgttaacatccaagcccatcttaaccttgtcacctggcttgtgataatcacgtgaatttacaatagcagtaaattcagtaccatcaacttcttggtgaagctgaatagttgcacccaaaagttctgaaacaacaacatttgattcaattactgaatctggccaggtttccataaatgcttcttctgagtgaatgtcttctggacgaataccaaagactaagtctttgtcgttgtagcctttttcttccagcagttttgccttaccttcaggaataccaatattcaagcctttgccatcagaaattcgaccgtccttgtagtgaacattgaagaaattcatttgtggggaaccaataaatccggcaacgaacatgttaactggcttgttgtaaacttcaagtggtgagccgatttgttcaactctaccaacagacattacaacaactctatcagccaaagtcatcgcttcagtctgatcgtgggtaacataaatagttgtagtacccaagtcttggtgaagcttagcaatttcagtacgcattaccacacgcaatttagcatccaagtttgataaaggttcatccatcaagaagataggtgccgcacgaacgattgcacgtcctaatgcaacacgctgtctttgaccaccggacaaagcacctggcttcttatccaagtactcttcaaggcctaacatcttagctgcttttttaaccttttgatcaatttcatctttaggcgtgtgacgcaactttaaaccgaaggccatgttgtcataaatggtcatgtgtggatataatgcgtagttctggaaaaccatcgcaatgtgtctgtcctttggagcaacatcgttcattactttatgatcgatttctaaggtacccttactgatgtcttccaaaccagcaaccattctcaaagtagttgacttaccacagccagatggaccaacgaaaacgatgaattccttatccttgatatgtaagtcaaagtcgttaacagaatatctgtcgttacctgcatattttttgtaaatatggtttaaatcaacctcaaccattgtttcccctactctctttaattatttttcattaaaaactttttcaatttcactcaatttcaactcagcagttgttggaacgatgtaatcagcttctttcaaaagctccttatcaccaattcctacggcaaattgacctgcagccttgattgcttcgactccagctttggcatcttcaaaactgattacttcatcagcctttaaccctgcaatttcttgcgctttgatgtaaatttcaggatctggcttaccatgatgaagtgttgctggatcaacaatgccatcaaattcatccataatacctaatctagttaaaatcttaggagcattcttagaagcagaagcaattaccatctttaagttttgcttcttagcatctgccaataactcagggatcccaggcaaaatgtcctttggcgtcattgtttctacttgttcaacaaatttagcgttcttttcagctgcgaacttttctttttctgcttcagtatatttgtcttcttgaccgccatattgcaagatcaagtttaatgaatccattcttgaaataccgcgtaagctatcgagctgagaatcagtaagtgtaatgcctaattctttagctaaattattccaagcagtcaaatgaaacttagctgaattagttaaaacaccatctaaatcaaacaataaacctttaagcattttgcgtttcaccttctttaagagtaagtttttggtctttaactacaacatctaaatcgtcacctttaagcaaggtaagttttgtttcattatgatcgacataaacttcgattaagcgaccacggtagttaatcttaaagccgtagtgatcccacttgtctggtacaaatgggttaaatttcaattgatcatgatcataacgcatccctgcaaaaccttgaacaattgctaaccatgaaccactcattgaagtgatgtgcaaaccatcaactgtatcgttgttgtagttatcaaggtcaaggcgagcagttctttcgtataattcgaccgccttcttttgcttgccaagttcagcagctaagattgagtggatacatggagaaagtgaactttcatgaacagtcattggttcgtagaagtcgtagtttctttccttttgttctttagtgtattgatcattcaagaagtagattccttgtaaaacatcggcttgcttgatgaatggtgaacgaaggatcttgtcccatgaccagtgttggttgattggacgctgatcttcaatttcgcttactggacgaaggttcttgtcaaggtagtcatcttgttgtaagaagatgccacgttccttgtcttctggtaagtaaatcttgtcaacgatgtcttgccacttcttcttttcttcatcagtaacattaaccctggcttgagcttccttagttgctaatggcaaacgctccaaagtgtacttaagtagccatcttgccatcgtactagtgaaccagttgttgttaacgttgttttcgtattcgtttggaccggttacgccatgcataacgtacttgttacgccacttggaccagtggactctagctgcccagaatcttgctgttccaaccaagacatccattccttcatccttaacgtatgaatcatcgccagtgtatgacgtatattgcttaatcgcaaatggaatatcagcattacggtgaatttcttcaaaggtgatttcccattcattgtgacattcaatcccgttgaaggtaaccattgggaacaatgcacctggtaagccttgttctttagcgttatggtatgcgcctggcaattgatcgtgacggtattgtaaaagtgcccgagtaacactaggatcagtaacacataagtacattggaacaatgtaagcttcagtatcccagtaagtagcaccaccgtatttttcaccggtaaaacctttaggaccaacgttaagacgttcatcttcaccgtaataagtcatgaataattgacaaatgttaaagcggataccttgttgagcggcatcatcaccagcaattacaacatctgatttgtcccagcgcttttgccaaacggcttcatgatcagctaagttttcttcaaaactcttagcttgaagcttggtcatcaattcagctgccttagcatcttgatcatctggtttgacgtcacgactagtaacaacaatgacatctttttcaagatcgtagctttcgccttcatttaactcaactgaaagcttttcatgaagttgggctgcttcagttgaaacatcacccttaactacttcaccattatgacgaagactttgcttaaggaggactgtaaattgtggaaccttgtatgggttagccttagtttcaaccttaatagttcttgcttcagcattttcacctaaaggcatccagaattttgcatcgtagttactgtcttcgttaacaacagttccatcaagtgctgcatcaaagtcgattttagctttaccacttaaaacggtagccttaactttaattaaagctgcttcttttaaggtaatatgtaaaaacctttcgaattcgaatttaaccttagtatccttaccttcataagtaaaacttctagtcagaagaccttggtgcatatcaagtgctaagtagaaatcactaaacttaactttagctaagtcaagtttttcaccattaatcgtaattcccatgttgatgaaacttggtgagttaggaaccttaccaaagtactttggatatccgttcttccaccaaccaacacgcgtcttatcagggaaccaaacaccagcaaggtaagtaccttgtaagctgtcacctgaatagccttcttcaaagtttcctctcatacccatgtaatcgttgccgattgcagtcatactttcttgcaatcttttatcttttggttcgaacttatgggtaacgaccttccaaggatcaatttcaaaaattcgtttcatatattctatctcccgtaatattcgaggttctctcttgtttacgctttcattatcctctagttgaaagcggtttacaatattaaatctgctgttaccgttatcaggattagttaatagaaaaagaaggtagatcttaatctgccttcttttttgcttattaaaagtaacttttaatgaacactcactacaaagccttttggtgccaattgattattctcataatcttgactaaacgtgttctcacaattgatctctactggatgatcggtcgtgttaaagtatgctttaattctttcattcccctcacgatcgacctcaattaacccattctctgttacgtgtaacttaattcgacctttaccgaaagtttcatcatgttgcaaacgaaagtcaatcaattgatgaactcgttgccaaaccgggccgtcttcttttgcccaatccattggtttacgacaatcaggatcgttgccaccagtcatacccatttcagttccataataaatgcatggactacccttttgcataaattcaaaagctaaggcttgcaaagccaaatcttggtctccattagctactgtcaaaattcgggctgtatcgtgtgaatcaagcatgttcatcatggctgcattggtagcatcccgatatttcatcaactggtctgtcaaacgactagttaattcttgtgctgacaacttgtgcttaaagaagtgatcctcaatttgcaaagtatatggataattcattacgccagtaaactcatcaccgttaagccatggacgagctgagtgccaaacttcacctacaatataaaaatctgatttaatatcagtaacgaccttgtggaatttcttccagaagtggtggtcaacttcgttagccacatctagccgccaagcatcaatatcgaagtattttacccaataagtggcaatttctaataagaaatcctgtacttctggattagctgtgttcaactttggcatatgcttttcaaaggcaaaagtatcgaacttaggactaccctcaccctttaatggatcgcggtaaggttcaactggatattcattaatgtggaaccaactagcaaaacgagaacttggaccatttttaacaacatcttgccattgcattgattgatcacccaggtggttgaaaaccgcgtccagcatgaccttcattccgcgggcatgagcttcattaacaactttcgcaaataaatccttgtcgccgaatgccggatcaacttgcaaatagtcaatcgtatcatatttatggttagaactggctttaaaaataggacagaaataaaggccattaacacccagtttcttcaagtaatctagatggtcaagcacgccttgcaggtcaccaccatagaagtcttcgcggccaggatgatcctccggattccacgctttaaccccttggggatcattagacttatcaccgtttgcaaaacgttctggaaagatttggtaccaaacagtatgcttaacccattctggcgttttcaccatatcaatttcatggcaatatggcactttgaaataagaaccatcttccataatggccttgtctacatcactgctaattgcacgatcacctacaactacactagtgccatcactgccaattacttcaaaggtatacttcaaacgatgatatggtgcttcaagcgtaatgccccaatgatcttcacactgccctacgccaattttttccatctcacatgttttagcctgttcaagtggcaaataattatcgcagtagtgaacaattacttttttaacgtcatttttagcactgtgaaaacgcacgcgaacatgacttggatcaactacaaaactatcttcactttcagttcggtgtcttaaagctgctaattgcatatattaattctcctttttcaacacaacacctgcataaggcatcaaagttaatttttcattagttaattgatattctcccgcttttagtgttgcaacagtataaccggctggtatttcaacagttgtcttttgatcactcaatgaaacagctacaatggcactttcatcatgtaaatcacgttgataaacatagctattcttatccgttgaaatcatataatacgttccagtctggaataaggcttcttttttgagttccagcagtttttggtaaaaattaaacatgctggtggtatcgttaatctcgttagctacgcaagcatcatcctgtttaatacctgttatccatggtttaacttcactaaaaccatggttctcagttgcatcccacggcattggaccacgggccggcaatttatgtgtttcactagccatagctaaggccgcatctttgctcaaaactttttctgcatcctttaaccatggcgctacaatttgatcttcgaattgatctgcactagtgaaatgtagattctttaaccctaattcttcaccgtaataaattactggaattccgcgttgcaaatacatcaacatcgccaagctcttagcctgagtttgtgtcttagctacgcgtgtagctaaacgagccatatcatgattattccaataaagagtaggctgcgatacgcctgctaatgtttgttgccaaactacttgattttgtttaaaggcagtcaaatctaatttcttaggctgatattgctctgaaaaacgttgatcacagttagaatcatcatcggtaaagtaccggaaggtaatcacactatccattaagtgattgcgcttagtcgtgtaatcaacagccaagttaacgctagcacttgcagcttcacctaataaaagcgtatctggataatcctgcttaatctgctcacagaaaggccgcatccattcctgcacctgtggtaagttagcgaaaaatggttccgcaacgattggcttgtttatgtccccatctccagttggataattttgtcgcaaatccgccttgccaatatggataaaagcgtctaaacgcaaaccatcaattcccttttttagccaatattcagctacctcaagcatggcgtgacgaacttcaggattcttccagtttaaatcaggcattcgcttatcaaataagtgaaagtatgattgaccggttccagctggatctggctcccaaacgctgccaccaaagaatgacccccaattgttcggccgcttgccgtcatgaccagcaaaaatatagtagtcacgatataggctgtcaggattcttgattgcgtcttggaaccaaggatgttgatcagatgtgtgattcaagacaaaatccatgatgaggtgaattcctgccttgtgcagatccttgattaagttctccatatcttccattgttcccatgtgtggatcgatggcgaagtaatttgaaacgtcgtagccgttgtccacctgtggtgaaacaaacactgggttcagccaaacggcgtttacgcctagatttttcaagtaagggatgcgcttacgaataccgttaaggtcaccgaggccatcgccattgctatcttgaaaagacttaggataaatttgatatataattgcgtgatcgtaccaatgtgccataattaatttcctccacgcatagtgtaacggattaaagaaaccgttttcaacaccatatctactgttatcgatatcaaaaaagcacaactcgcttttgagttgtgccttttcttctattcaattactaacttttagttgtgcttacgtttccgatcaacaccaaagcctaaaagacctgcaattgaagctaatgctaaaccaataatagatgctctgttttgtttttcaccagtttgtggtaatgtcttggcattcttttcagcttgaacagcagtattattactgtttgcgcgcttaccatgaacattgctattgtagctgtgattttcactattcaatcctgcggcctgattattccctgaattatgcttagtctcggtccgaatattttgaccattatttttggctttatgatgatctgctttcttacccgaattatcatcttttccaggtgtcttatcagttggtttattatctgaaggtgtagtattacctccattatcagtcttaacaactggaacagtgattgatgaacttactgaagctgaggttggagcattgtaaccatctttgatcttatatccagctggcacaccgtttttaatggcacttgaaggatcaatagttgtaccttcagtacctggaatagtggttctgccaacttcattaccattttcatcacggtagataatggttacttggccttgttgtggagtaggaggcgtgatttcaccgccaccgtttttagtataagtaatagttacaacagcatccttagtatctgcagttggagttacttcagcaacactatcttgacttggagtaaatccagtaaaggctggagcagtaaaggctggccaagtgctggttgcgtccttgtcaatgataaacttatcgttttcaactttacctaattgccagtcaccgtaaactgttttgacatttggatcagttgaaacagtcttggtgcgaccgaaccatacaacttgagtagaagtatcagtcttacctgttacaggattcttaacgttgattgtacgagttggatgagcgtacatatcactgttttcgcctggcttgtttggattgattgttgggtcggttggctcagtagtcttagtgtaagcaactgttacattagcatttggagtgtcagcattgaccgtctttgcatcaacctttgttgcttcatgcccattaaccgtggacttgtaaccgtcaactggggtgacatcatattcttgccaactaccttcagaggcaccagttgacttccaagaattattatccttagtagcaactgtccattctgtccaagtaatattaccatcttgatccttggtgccagcattttggccttcaccaccacggacaaagtgaacattttgggtaatgatgtcggtagtaccatcagtcttataaatcgtgattgtccgagtgacatccttgttcatatctttgtcggatggattgtatggaactggggtgatgttgtcagactttaagtaagtgatatgaacagcagcaccatttactggttgaccattgttaagtgccgaagcgctagaaacagttgtagtcttagttccattaacatatgaatcataatctgaaatttgtggtgcattcattgagacaaattctggttgaccacctaaaacaaacttgtggttttggatagtgcctgcctgccaattacctgtacccgtaacttcaccagttaccaagtcttcaataccattgcggccaaattctactgattgagtgtcaatcttcttttcagcttcacccggtttagtttggtaaatatcacgagttactgtcttgaacatgtccttgtacttaggatcagttggatttacgcctggagtggttggagtgatgtccttagtaccatgttcaacaagaacttcaattgcacttggagcagtagtgttaactgtttcagctgatggataagtgtaactctttgaaattacccatttttctggaacattactatcaattgtattcttttgagcttctgcacttacaattgctggagtagttgaagtaaattgtcccttaattgcatccttagctgtaaaaatcacattacctttcgcatccttataaacaatgctttgagtaaagttttcaggtgttggagttgcagcttcaacattaattgttgcaggaacatcaagataagtaccatcactaaagttaattcttacagtacccttaacgccatttgcaatattcttagttgaaggctggccattttcagcccaggtcatagtgaatgtcttggcagaatcattggcttgtgctgaatcagatgaattagtgccaccccagccattttcaagactattaacattaatcaaagtcttaaattgatcttgacttaagttagaaatattttgattttgcttgaaagttaatgactgattagtagttgaaccatagaagttgaagtaagtgttcatccaactgtcttgagtagataaaccaatgtagccgaataaatcactgtcatcaaagctatagtttacacgccacttagagttacctggtaggctttcaccagatgaagtttgttccttagagttaggatttgctggatcatagagaatatcaccggtaccatttgtaatatcccaattgctatttggagttaagataccattacctgctttgacccagctatacttaataacatttgcatcaaagctatctgacggatcttgggcattcacatacttatcaccttgtaagttataagtagtaactgtcttgtagtcacttgctgcactacccttaccatcccagtcagttctgtagacaatttgttgaatcttagcgatattaggatcaagttcatgactatcagtggttctgtgaactgaaatagttggtgtgatgaagctcgtcatactttgattgccatagtaggtatgatgctctggatcattaccagttatcataactggagcagtaaccgtttgtgtatccttacctggaacactaactgtaactggaatcttgtagaaccctggtgttgcgtcttgccctggcttcaaagtaatcgtaccagtagttgaatctactgttgcccaagttggaacgttatcacctgctacaaatttagtaccatcaggctttggtacaccatttgttgtaacaactggatcagatgctgtgctccctttttcaacagtaactgtcttataacttggactatattcacctgctggcacagcattaattgcaccatctttggtttgaacgtctaagtaagttgggttaccttgagcatccttatcagtaaaggtaagtctaatagttgcctgagtatcaccagcctttggtgcacttgcccatgaagcagtgtactgaataccggcattatctaagttaaaagtatcaactaaatcattcttttgagcgtcggttaaatcttgacctacagtaaccttaaccgggttagttacatccttagcagtagcaccagcagctttaatcgtcattggattactgtcaacagtagtgtcaccaactttaactgatacagtaccagttaagtcttcacttgcagatggagtagttacaacagttgttggagcatcgcccttccaagtaatgattgcactagtcttatcaactggcgtgctggttaccttaccatcttcaccaacagtgtattgattaattgcactaactgcttgacctgcagtcaaattcattgaattatctgtagtttcatgagctttatcaaatgcacttggagcagttacaacttctagggcaccagtcttagtggggtcagttggatctggaatgatcttgccagtgtgagtagcattgccaacataaactggtacgtgaactgtatccttagtagtatctggatacgttacaacaactggaattgtagtcaagccagttggcgtttcagtcgttggggcaattgttaaccaaccagtattaggatctactgtagcaaatggtgtgttatcaccaacaattttatacttagtaccttctggagccttgctacctgggttgattgttacagcactgccttgtggagttgattcaggatatgaaggatcttctgacttagattcaccttgttttacgttcatcggatcatatgaaggttggtaaacatcagcatcagggttagtgatatttaatggaatattagcaaaatcaacggtaccgtcttggtaggttacctttgcccaagctgacttatcgctagtcttcaaattaccagttgggttagttggagcatcttgaccgctcattaaatcttgccattccgttgcgtcagtagctgcattgtaccaatctacatttttaatagcagaaagatctggtgttatggttccatcgctagtccgtaacccagaaataccgtccttggcagttaagtcatttaaggtttgtttagtattaccatcaatagtcttgactactggttgatattgaccagaatcagttggcttagctacttcttctaaagaactacccattgcaactctttgtggagtccaccagttgaagttattcaagagtcggtttaagtatggagtttcatattttacaccatcagctggttgaccttgagtaactgttccatcaataaactgaaaactattaaacccagcttggttttgagcaagatttacttgaccgtttgagtgtaaaaatttaatttcaccattcttattttgtcctagagtgttgccggcttgagtaaagccagaaattgcattatcaccccagttgttttgagtttcaatattattgagataccagtaatcagatgcacctgtgcctttatttccttcatcccattgagcaaatggcaatttaccacctgcactagtaatagttacattattatttttattttcaagacgaagtaaagtacctgtttgatttccggtacgctggaaatttacatacttagggttggtaatagtaacatggttatagctatcaccagttccaccaccccacatagttaccaagccatatttaggagtattagtgaagaaccctttcgtaactgaatttagaactggctgagcattatcttgtaagtcaagcgtcgcaccttcatggacattcaaatcccacttagagcttgaaccactgcctgaaccaaatgagattaatggtgtagtagattgattgttatcaccagtacgaacaattattaatttaccttgattatctaaaacattggaatcagcattagtaatattagcagcaaaaccaacacctaatgaaataggagcaaagtggtaaccatcataattagttccaccattggcaccactaccatcattactttgtttagtattgatgttaacaacaccagttttgccaatgtttaagttaccagcccaaatagccattgagtgaccatcagccatgttggcatttaaattaccgtcaacttggacagtaccagtaatagcgctgttgacaagcatccctttaacatctttagattggccatttaaggttacggttgcaccttgttgaacatcaattgctggagcagtatcatttgtttcatcttcaactttggcccgcaaaatattgccaccagcgttttgatcgttgttagtcttagctgaacttacgttaaagatagtgttagaaccatccgcaaaaataatgtgtgcagctgaaacagcacttgaataattagaaacttgattccctgctacattaacggcttcacaagtgatattgttattacccttgaaggttaccgtagtatacggattatcacctatttgttgagccatcgtggtgttataaaaagcaccatttttaacatcagcagttacattttcaaatgtaaccttgttgttagctaaaagatcagttcttatgtcgtttccacccatgtaaattgggctaaaggcaccaccataactagaccatgaattatcataaccatcagcgttaatggttaaattcttgaaagcaatatcccaaggattactatctttttgattgttagtagtaaagctaagataattagcaccaaagttaatagcgtgaccttgaccatcaatatctaatcctccagaaatatttgaaccagttaagttcatctttccagagttaactagtggttgcggacgattaataccgttaacatttgtacccttattagcgacagtaatgtcactagttaatttaattgtaccgatattatagtcgtttaaagcattaactaatccttgccagtccgctacttcttgtgattgagtaccacgtaaattttgttgagtggtagctgcaacttctctaggttgtgcagctaaatttgctccaagctcttttgcaacttcatctttggtcttcttagcactgatattattgtcttgctcatttccaagtgataaaacattaaccttaccacgcatggtgctagttaaatcgttttagttaataaaaaagtccaatcttgttagactcgacttgtaaatagtaataatagaaaagagtctgatctgattgaactgccttaagcttaagcgttttagccaccatttacaagttagttttaaagatttagtgataatttgtcggcactggtatcgtttgtatgcaccggctgagtttactcatcagcgaaatattgatcaaattaaaactacggacagtctgattttggctttacttatctggcaagctaagacaggaattgaatcacaaagaagattctgtgaatgtttcaattgtttatcacactcacgttttaatcggcgttcacgtcagctattgcaattgatttatcagatacggcaagaaatgaataaaaaggttgacctgaatggacatttcttgatcattgacagctttccggtacctgtttgccaaccaattcgcaactatcgtgctaaaatttttcgcggttatgccaacattggttataaggccaccaagaaaatttacttctatggtttcaaagttcatgccattgttagcgatgacggttccattcttgattatgtcgtaacaaaagcatcagttcatgatgccaaggagacagttgaactgctggaaaatgcccatccatctaattactatcttcttggcgacgaaggctatttaggcaaagaactgcatcaacagctaaaacaaatgggttatgaactttggacaccatatcgtaaaaatatgacaggagctaaaaagcacaatgatcatcaattgatggctattcgcagaacaattgaaagcgacttttcgcttctgacctattacaatgccgagaacaatcgagcacgtagtctgataggctttcaaagccggttggaaattgcaattttagcttataatttggcttattgtctagaaagatttaactagcaccacgcgtataattcttatgtttatggacagatcgcgtatttaactaaccgtgttatcgaggaagttcacgaaaaagagaaaattatttctgaaatgcaacacgaagcggaagggttgtctgaatataatctactcttcactatccctgaattcggtgttcgaactgttacttctttgatcggtgaattaggagatattcgtcttttccatagtagtaatgctcttaatgcctatatcaggattgatcttagacattattatgaatcaggtaactttgttgccactgatcatattagtaaacgtggtgatgcgattgcacgtaaaattctttttaaatccatccaaaacattgccgtggcaagtcattttcatcctaatcatattaatgatttctatcagaaaaggaaaagacaatcttctcagccagaaactaagaaaattgccattgccgcgatacaccgtcttctcagaacgatttatcatcttgtaaaatataatcaaccctataattatcaaatagctaaagtataatttaagattgattattactattattgtgcaacccatgaaaaataaatctagttcatgagcttgttttgttatactttaaatttaactttgagccattttaattatttaattaacttttctatccagctaaattccaaggaattcctttaatatccttgactattcgtagaaaaccaaaataagcactgatgttaaattcatcagtacttacaattgtagagtccctttgttcaacccgtattgataacgactgcttacaataataaaattaagaccactagaataacagcttatggttttcgcaactttgatcattcccgtatccgaagtctactagctctcaaatctcatggtaaaaactaagctaaaagaaaaggtcagctcaagcagcttcgctacttaaactaacctcatcaaaatacctcatcagtactgacaaaggggtaaaattgtagagctaatttgattacttgcgcttcttgtttacagcagcaaggccaaacattcccaataaggtggaggcacctaagcccattaatgttaagctattgtcattaccagtttgtggtagttggttatccttagctgtcgttggttgagacgtaatcgtcttcccagtttgcatgttaggaacattaccttctagtttgccagtaacagcatttccattaggagtagtgtttgtaggcgtattagtagctggtgttccttgtccttgatgatcattagttgttggttgaccgccattagttgggatcaaccaacaactaatgatttgattagggttaccatccttgaaggtgtaagatgttggaacactttcaccaggaactaattgataaccatcaggaatgtgaatattaactggaactgtctgaccagacttgccaggattgtccggaagcttatcgcttggtgtctttggatcagttgttgttgtctctggcgttttgggatcagttggatctgtgtccttagtgtaaacaaaagttgtggtgtattggtatacagtatactggccactcgttactccaagagtacgaacaagacgataacctttaattttcttaggttggacttgccatggaccatttgcataccagcctttttgcggattaaccccattatttttttggttaggattatctaggttgaacgcaagcgtatcattattcctaagcacatttccttgctcatcaatgtacctcacagttactggtttgtttggtagcaagtaaacatgtatccccttagcgtaccaattgaaataatcagaattaagatatgtccctgtacttcctatataggagtaaccttgtttttcgtaatggctaatctcctcactcatttttttctcataattaccattgtttaggtcaatccttttgccatagctaccagcaatcgtaaagaatttgtacggtagatttgtttcttctggaacaagtaacaattcagtcctattactatcagaattattttttataaccttcttatacttgaaagttaaataaacatagttaggatcagctaacgaatttcgagtttgaccagtgattttaccctttaaaacaggttcagaaactaatttatatccaggaatattaatggctgcggcttcatagcgtgatgcatccggtgctttcttatcaccagcacggtgttgtggagattcaggggccatccagaaactatctagaacgattgatgctaaaatatgcccgttatctacatcaacatactctactttgattggtgacaatgatgcgtaatctaaattaatgttaatgtcttgcgtagtaatacctttcttaaggcaggcattaccttgtttatcaaaatagaaatacttattcaaaacttctgaattcattaatttataaccggccacagtaaattcttgatccacactatcccctggtcgaattgtggtctgcttgaaaggttgtttgaatacataatgaccattactaatcacttgaattggcttatgtagggtgacatcgcgaaaattcatagtaatgttgtacttactgggcagtggttgttttgctgtgttttatggattatcggcatttgttgcgctggcgttgttgttttatttggaactaatgttgatgaagtttgatgaccaaccgtatttgattcgtcgctaatccgaatattgcttgaatgggcactaacttgtggatcagtcacttgagtcgtggatgtattttgagcagcaactgtcgtattatctgccttggcattaccactaataatgaaggttaagcccaacgaaactgtcaaatcttttgtgtaaatagttctttctcgtaaattgattttttaattatttatttaatcaaagtaggattctaaggtgtcctgaacctgaccaaagcctttatgaattcgattgaaataacggtcattgtagctcattgcctgaataccaataaaagcatcaagcgactgttcagttggaaactctgccttaggcttagctttgcgcttgatcacattgttaaatgattcaatcatgttagtcgaataaattgaagctctgatctgcttgggatagttataaaagaccagcagatctggttctatgtctttcaagcttctgataacatggctgtaaaccttgccccatttggtatagaagtcatgcaggacagctgtggcttcttctttgtttgtctgttgatgcacctgtttgaattcgttcatgatcttttcacgatcgtcgacgcgtactttagcgcagatattgcgcatgacatgaaccaaacagcgttgaaaatgagctttaggataagtcctggccaaggctgttttcatgccaacaacaccatcagaaagaaagagttcaacttgcttcaagcctctggacttcatgttttgaagcatctctgtccagacttcaatgttctcactaggagcaatgcagtagtcaatgacttccttatgtccattaggtttaatgccaatggcaatatagactgcttcacgctcaaacgtttctcggcgcaaaggaaggtatgtcgcatccaaatagacgcagaaaaacttgtcgcttagcttgcgtttgtggtaagcctcaacctttggaatcatctgcttggaaatatttgatacctgagctggactgtaatggctgccatacatcttttcaattagatcggctatttccctggtggtcacgcccttggagtaaagcttgataatcatgctttccaagatatccgagtgctgcttgtagtcaggcagcgtgtgctgatgaaattgaccgttgcgatcccgaggcacttgcacttcaattgggccaaattgcgtatcaactttgcggaaataagcaccatttctagagttgccagtattccagccatttctggcatagggatcatagcccagaaaggcagtcaattcagcttctagcaagttattaacagcctgttgtagttctttgcgcaataaatcatttattttgtctggattgaatagagcttgagcaaaatctttggtaaaatcattcatgaaggagttcttctttctgtatgtgttttttttgttcaaaccaatcatacgagaaaggaactcctttttctaatgtttaaagaaataaatttaaggaatcattcatccttacacaaactattttacagtctcaaatcaagctcaagtcctgtcactattgagctttcttagacgtaattagtttttatatgatctgtttcagtgcaatttgtatgaatcgtggcagttggttaataaagtcattgattacttcatctatcttttcaaaactattctgtttaagctcttttaattctgaaattaagtagaccaatgcatctacgaatctaatatcaggtaaggattcgttcattagatagaataaatctccgattgtcttatcatctgtattttgtctttcctgccaggtcaatagatcataagttattgctgtaactgcgatatagccacattggccatcatagctttgaacttgagatttatctaaagcaagatattgcttagacgtcttaaaatatgtttcaatttgccatctacgaccataaagttggatgatttcttcagggctaagctttgtctgagtagtagctaaaaccaaatacttgttcttgtttccacggttggagacaaagacgagctttaataaaaagctatgtccatgatattgagcctcaactatgcttgaataaagataatgtttctttttacggatgtttgaagcagccaaacgatcatacaagtctttaacgctatagcggcgatggcgataaatgtaataaatctttgaactcttcttgatcatgccaagtccatctaaaccgatcttctttaaaatccaaaacattcttggagaagaaaaccaagaatcgaataagacgtatttagcttctactcctaatcgtaaggcttgtctaatcaactctacagttacatcattcatctttctctgagcttgatttctccttttaccagaaattgaacgttcatcagcagtaatgggagcagctccaatcatatttttcttggttttggttgacatcaaggcaaagttaaccggcaagaaggtattgccatcgctccagcctaaagttaaaccacgatatccgttcaaatactcatgcttgtcatggtcatagactttagctagcaattcggtctttttagaaaaagaccgagccatcagcgtatcgtcaacgataaaagcaagtcggcgtcttttatcgataaatggttttaagcagccaatgagccgggctgcaatcaagcataatagtttttgccagttgattcttccatcgttaagtacattgcgagcagttctaacggaaaaacgtttgtcatccttagctctgaataaagaaagccgagcaaaatgtactgacatcagccaagagataatcatggttaatgaaacggtggatttacgcttaaaattgacttgtttagttaacttagctagaccaattagattaataaatcccggatttaaaattgaagtgcaacactaagtgttaaacaaaaaggccatgaagacctaaacttgaagtgacgaaaaatcaagaaaggaagatcttcatgaccaattcaaattctagcatttctaagcactatcatcaattaaccagcgtacaacgtggacaaattcaagcaatgctggattccggcataacttcccgtactgttatcgctcaagaagttggctgccataagtcgacaatcagtcgcgaaatcaaacgcggaagcgtcctgcaaagagacagcagctatttattgtatgagcactattacgctgatactgcacagatttattatgagaagcgtcgcaaaaactgctatcagcgcaatccattgaagcattatgctgtctttttgagaatgctctccagacgctttaaagctaaatttgatgccaccagcatcgatgagttcgttggtgaattcaaaaggactatgccaggctacccttgtcccagcacaccaaccgtctatcgctatattgatcagggcttgctggacataagcaatattgatctgcctatgaagctcaaaagacgcaggaacaagcgtcatcacagccatggcggtcacgctttgcacaagaagcatcttggcaattccattgaacagcgtcctaaggaggttgaagacagaaaagctccgctgcactgggaaggagatctggttaaaggcgtcagacgcaagaatcagcctgctttaatgactttgactgaaagaaccacacgctttgaagtagttatcaagattcctgactatcgggcaagcacatgccaaaggctgcttcaaaaggagattgacagacatcctgcctggtttaaatcaatcacgtttgacaatggctctgagtttgcggatatgaccaagatcaagggctgccagatttactttgctcacccatattctccatgggaaaggggcaccaatgagaactgcaatggtcttttgcgtcaattcttccctaagggcaagagcatgaaagacaagtcaaaagcttatgttcaacaggcaactgatgccattaaccacaaatatcgccgaatcctccaatatcacacagcagaggaactcttcaagcaatatatctcttcataacctaactgttgcacttaatttgacaattcaggtagattaataaatgaagaaattaaggatttagtatcattttctgtgtcgatttgttctatactgttcattgcgcaggatctcctttactttttaggtcgacacttaaagtataacgcagagagatcctgcgtttttatttttgataagaaaaagccaagaggcgcggggaaggagcgttaatcttagctttcaagtttcagaaataattttaaaagcagttaaaaagcacctctgagttatcagacgtgctcgttatcttttcgatttatctagttgattggcgccgaatcagcttcggtttaagcattacttcaccttgaggtgaacctgattgggcaatcttttgcagtagcattttagctaacatttcacccatttcaaaaattggttgtttaattgtcgttagctttggattagaaacttgatctaaaaagacaccatcaaaaccaataactccaaagtcttccggaattcgagcgccttcatcttgcaattgccgtacaacacccactgcaattcgatcactggcacagacgaaacaagtatcttttttaaattccttaaaatgttcatgaatcacatcttgcgcagcatgactatgattagaaacccgaaaaatttgtggtatcaactggtgttgttgcaaagtgttgatataaccagcttcacgtgaatattcaaatggctcttttaaatcaattccaataaagataatgtgcttatataaccggtctaaagcatattgagtagccatcttctctgctaactgattatcagaatcaacaaagtcatagccgcggtgattttcaccaaataaaacaaaaggcttatcgagtttatcaaataattcataatctttgtttcgcgccccggtaattaaatagccatctgcatgttccttttcaatttgattaggatccgtaactaattgcatcgcatactgcttagtatttaaaccacgagcaaaaccaaaaagcaagttcatatagtatggctcagtggtatcaatatcttctaaagtgacgaattttaccacgttagtccgattattaactaaagcctgtgcaattgaattgggatggtagtttagtttctccattgctttttctaccattgctcttaattctggcgttacttgctcaggatgattaatcactcttgataccgtcatttttgatacatttgcttctttagcaacatctgataaagtagtcatattattcctattctaagtacatctttctgaatcggtttaaatctttttggctaaagccaagctcttttttgaaaaatccatcaaaactgccccagccttggcgaatagtttccgtaattccacgaatagccggtccctctcccttggtaatattcattttagaaactaggctagcaatttcattatcatcggggaactgtttagccaaagcaaagtcatacaattcattggtcaatacgcgtggtgctagttaaatctttctagacaataagccaaattataagctaaaattgcaatttccaaccggctttgaaagcctatcagactacgtgctcgattgttctcggcattataataggtcagaagcgaaaagtcgctttcaattgttctgcgaatagccatcaattgatgatcattgtgctttttagctcctgtcatatttttacgatatggtgtccaaagttcataacccatttgttttagctgttgatgcagttctttgcctaaatagccttcgtcgccaagaagatagtaattagatggatgggcattttccagcagttcaactgtctccttggcatcatgaactgatgcttttgttacgacataatcaagaatgtaaccgtcatcgctaacaatggcatgaactttgaaaccatagaagtaaattttcttggtggccttataaccaatgttggcataaccgcgaaaaattttagcacgatagttgcgaattggttggcaaacaggtaccggaaagctgtcaatgatcaagaaatgtccattcaggtcaacctttttattcatttcttgccgtatctgataaatcaattgcaatagctgacgtgaacgccgattaaaacgtgagtgtgataaacaattgaaacattcacagaatcttctttgtgattcaattcctgtcttagcttgccagataagtaaagccaaaatcagactgtccgtagttttaatttgatcaatatttcgccgatgagtaaactcagccggtgcatacaaacgataccagtgccgacaaattatcactaaatctttaaaactaacttgtaaatggtggctaaaacgcttaagcttaaggcagttcaatcagatcagactcttttctattattactatttacaagtcgagtctaacaagattggacttttttattaactaaaacgatttaactagcaccatgcgtattggtcaataaataatcacgcgaaatggtgtcatcatcaacacctaatgcggtcaaaattaacgccgaagtcatgcctgttctatctttgcccgcactacaatgataaactaacgcatcttcttcaggtaattcaatcaattccgcaaaaattttagcaaattcatgttggctatgtgaattaagcaaaacctgttggtaaatttgaccaagccaattgtcacccatatcaggaatatgatggacaaagcgatataacttgttatcgcctttattttgcttgcggttttcagaataaatatgtgcatcaacaaaacggacatttgaccaaagcttgtcaggcgctgaattttgttcatatttagagcgtaaatcaacatctacggtaattcggcgttcaactaacttttcttgatcttccttcgacaaggagctaagtgaatcagaacgatatattttgttccactttacatgttgacccttgtcattttggtagccgccgatgtctctgaaattcagcggtccatccaaagctaatattcgatcatgcttcatttttccttgcctttcctcattaaagtgttaataccgtacttttattatatcattatcagtcatgtgcaaataaccgagcggcacgaattgctctttgccaacctgaataaagtttttcacgttcaactgcactcattttcggctcaaaggcctgtccaatcgtaaaggtatgctttaactcgtcaatatttttccaatagccaacggcaaggccagctaaaaaggctgcacccatgctggttgtttccagcgttttagcgcgttcaatttcaatccctaaaatgtcagcctgaaactgcatcaggtaattgttgttgctagcaccgccatcaacacgtaaagcaggaatttcaatgcctgaatcttgttgcatcgtatcaacaacgtcacgggtttgataagctaatgactgcaaagttgctttaattatatccttgtcagtagttccacgtgtaacaccgaagattgaaccacgagtctccgcatcccaatatggtgcgcctaacccagtgaaggcagggacaacgtaaacctcgttctctgatgtcgactcaagcgctgcttgttcagagtctggcgcatgcttaatcaacttcatcgaatcgcgtagccattgaattgcactaccagccacaaagattgatccttctaaagcataagtaatcttaccattaatgccataaccaatggtcgttaacagattattgttagagtctgttggcttgtcccctgtgttcatcacaataaaggcaccggtgccatatgtgtttttcaccattcctggtttcaaagctagttgaccaaataaggctgcctgttggtcaccggccatcccagcaattggcacttgtccaccaaagaacatatatgacgctgtttcaccataaatctctgaattcgagcgcacctcaggcaacatttgcttaggaatattgagcaaatgcaaaatatcgtcatcccacttgagcgtgtgaatattaaacagcatggtccgtgaagcattagtgtaatcagtcacgtgtttagcaccatcagttaacttccaaactagccaactatcaatcgtgccaaaaagcaactttccctgttcagctttttcttgcgcgccaggtacatgatcaagaatccagcgaatcttagttgcactgaagtatgggtcaataattaagcctgttttttgacgaatttcattactatagccttctttttttaatttttcagctaattctgttgtctgccgtgactgccaaactattgcatgataaattggctcacctgtatccttgtcccaaacaacggtcgtttcacgttggttggtaatgccaattgcggcaatttgattaggccaaatgcccgaattaataaaagcattggcaattgttgtttggaccgccatccagattttattagcgtcatgttcaacccagccaggctctgggaaatattggtgaaattctttttgggcagaagcaacttcacgtccatcatggtcaaaaataattgctctagtagaggtggttccttcatcgattgctaaaatatatttttctgtcacagttattctcttttctacaaaagcgctttcttataatattactgtttttctgatgcagattctagcagttaatgtaatagatacggtataatttttataaggattttttaaggagggcattttaatggaaaaaaatcaaaaaattgcggtaacaattgcgggtaacgatagcgacggcagcgcaggcatgccagcggatctgcattcattctacgcccgcggtgtttatggcatggggctgatgacagccgctgttgctggcaataccaaaggaatttttgcccaacaaattatgtcacttgattttattcaaaagcaatttgatgtactaaacgatgatttcaagattaatgcgactaagacggggatgctcgccaacaaagaaattatcgactgtgttgccgataatcttaaaaaatatgacatgggtaaaatcgtgctggatccggtcatcgttactaagcatggcgctaccctgcttgacgacgatgcttatcaaactttcttagacaaattattgccgctagctgatgtgattacgcctaacttttacgaacaaaaaaaactgaccggcttagaattaaataataaagaagaaattcacgccggggctaaaaaattgcaagcgatgggcgctaaaaatgttctgatgaaagggcgccacgattcagatacgcaaactacagtaaccgatatcttgttaactgaggacggtgaattccacgaatttactaagccattctttaaaaccgaccgcgtaaacggcactggtgatactttatccgccgtgattgcggcagaattagccaagggcaagtcagtgattgacgctgtaaaaattggtaaggactttacctatgacgctatttctcacccaattgatgttggctcaaaatggggcccaattaatcatttggctgcacaagaagaaaacgaataactataaaaaataccgaagctcagatttgaaacttcggtattttcgtgtctattttatcttctttaggcctactatttttcctgaatctagaacacttaccttcgttaattggttattattgtacttatatgatgtaccttcatccgaaagacgtcttgtgggtggtcatttgaccactctttttttacgcaaaaaaacagcaatgaaatcaatcattgctgctaatttgtttactttttctcaattacaaaataatatcctgctgtcaaaatttggacaattccttcaagtgcaatcgcccaatctgcaccgaaatgcgctacgatcagtccacctaaaaatgacccaatcggaatcatcgacgacaaaatagaatcgttaattgtttctactctacctaaaatatgtgggctaaaactctcttgcaccaacacttcaaagttaatattcatcatcacgatccataattcggacgtaaaaaacaaaatcaacaataaaagcggcatccctttgggaacaactggttcaaggacaattgctaaacctgataacgtgagacaaatgacgactaacctttcaattttgcttttatcaaaagttagtcgctgtaccagtacactgccaactaatccacctattgatgaagctaattctaagccaccataactaattgccgatttagtcaaatgttcagtcgcaaaatacggcaaacccacagatgaaatgccgtaaaaaagattagtcactgcaaaaggcatgatcaaccgtgctatcttgtcttcttgtttcaaattttgccagcctttaagcaaatcttgcccataattttctgtgaaatattcattcgacttatttggaagtaataatttcctaggcaatattagtcgtgtataaaaagctagggcgcttgcaaaaaatattgcagaaataattaccgtggagtcaaatgacatccaagtaatcaataacgttgccgctgcattcaaaaacaaatccagcgtcttataagtcatttggaaaacgccatttactttagttagcttcgcttttgaaacgatgactggcaaaattttttcttcagcaggataaatcaaagttgagccaatcgttgaaatgacgtatacccctagcaaaagccaaatcactaaatcgcgccacaacttaacttgaaacagcaacgtcgctataacgctggtcactatctgcattagagttacaagcgtaagcatctttttgatataaacacgatcaatcagcggcccgaagacgaacgacaacatttcaattgatgagtctgcaacaaagattaacgacaagataagcggcgaatgaaagcgtaccttgaaaaaccacaaaatcgccatataaaatagcgaatcggcgatattggttaacactcgtcctgctaataatcgtctgacattgacattttctttttcgattaagttaaacattttcccattccttttcacaacactattaatgccgctgaaagccagggaaaattactattcaattgtagttaaaactcccagaccttcagctaaaaatctgggttgagcctcaagtagcgtttgacgaatgaaagaaaataattcattcgcaaacttaaacctaaaatgtcacgcattttagtcctcgctttctgtgaaaattaagttaattatagcatggatagcgacttatcaataatagtcattctatccttatatttttcgtattttcattcaatttcaaatcatgacttatgataataaccaaattaacttgcgctatttcctgcaatagttttaatagatcactttgtaactcaggatagatatttgccaacggttcatctagtaaaaaacattgcgcgccagtttttaaaacagcagaatataactttactaactgtatttcacctgttgatagttcatttatctttctatctaaaatcttttcaattctaaattgtggcgaatcaaaaacttttgcaaaatacttgcttttataaacctgacttttatcagaatatgatcctaaatagtccctcactgaacaattaggaagtggtatatcttgaaataaacaacttatatttgattctctcagttttcttttattaattaaatcagcatctataccatttatggttatttttccttcctttttcggcgtgtataggccaattattgttctgagcaaagtagattttccaattccatttctgcccctcacaatataaaatcctggagtaacaaaattggcagaaaaatttgaggtgaataagggggttttttcatctaaataaatattaaaatcctgtacttgaatcaaatttattttagaaattatttttttaccatcttgttcattcttcatggttagtaaattgttgattctcatccacgctactttaaacgattcaaatttaaataagatagaaaaaatttcatcaacctgtcccaaaagttgattaaaatattgaaaaataattgaaaaggaaccgattgtcatcttgccggaaatcactgataaaccgccattaataaacaatactaattgaaaaataagttgcaaaacaatctcgctattagacatatgtcaactaccctagactgaagtctagggcttagtggctcgttagcttgcgctaaccagaacaccaacttgcttagatacggacttgacttaccagcaatagtcttttgactattgccgatagaggtcgtctaattaccaaagccttttgagtccgcgagttgctaacggactacagcctttctaggctgctttttttattttaggattctgccacttgcctaatcctttttctaagatgttcactgccgcattccaatcacgaatatggtgcgttcaacagattggacaagtccattcccgatctttaagcgttagtttcttataaccgttttgtcccataatactgccacaagcatgacagcgttgagtagtatatttaggatcaattgttagaaattctttgtcatatagatctgccttataagccagcatgttcaggaagctgcgccaaccaacatcagaaatagcttgagataaggcatgattctttaacaggtttctgcttcttagttcctcggtaactactaaatcgtggtttttgattagtgcagttgagagtacttgtaaaaagtcactacgctgtcttctaatcttgtcgtgcagtttagcaactattagacgctgtttttgatagttttttgctagccgcaaattgcgtccttcttttttagcccggcgctgccggcgagacaagacacgttgagcgtgagccagtttcttttgggttttgcggtaaaagcgtggattagcgaccattgatccgttagatgctgtcaagaaattatcaaggttgagatctattccaatttgactctgcgtcttaggcaaggctttaacaaaggcaatatcgctgcctaactgcattgataagtagaactgctcgtcagcggtctttttaatcgtgactgttccaatacgagttggaatatgattaagcaagcgctctttgattagttttctaaagccggcaatgcggacaattcccagcttaggcagtttaacgtgctgagcatcaataaacctagctgtcccgttatcaagaaaagcttctttttgcttaggatattgacagttggtctgatatgaccagtcgctgcgttttttatggaaagttgggattccatgaccaatcttacgatagttgttccaagctttctgatagttttgaatcgcattggcaagagcgagactatcaatttctttaacacgtaaaaagctataagcatcgcggatattcttaggcttagctaataacgagttattaatgactacttcttctgccagcttagtctcataattattaagaatagaaaagacaaaaggcattgcttgatattgtctaacagctaaatagtgcttagcatgataattgcttcgattgcgtcctacataagagttgtatacaaagcgttgcgcatcatagtttagtttaatgattttcttttgcttagaactaggataaaagcgaagcttaacgccaaagtgataggctaaactgctcattcttttcatgtgtttcacctccttctgtagattagatatttatattttacaggaaagccgaacatatgtctctatttttttgaataaaaaaagctgactgctaggtcagcttggccctatccatccccgcattaagatacggggatttccgggcattttcattaaattgagaagaaaatctcgcttagcaacgcctaaaagcgttcttttagtattgctccatctctcagtttcgattttctctcttcgattaccttttatttcaatatatctgcttaaccattcagtaaaaccagaaaagtactcattataagcttctttcaattttaaactaacttcaaaaatcttagatcgcaaaaataaatatatgagactatatgcaggtaacaggatcgctattaacaataaaaaaccagacccagccataaataaatatgtaaaaatcaaaattgaagaaagggcgattgaaataatttgatttattgtttggaataaaaaagtcaacacttcagtagtatcttcagtaattttatctgctgtttgaaccgaattcatctttgtaactgctagcgtatccttcacatacagttctttcattattacatcattaacttccatgtttatttctctaaatcttaaaatctgaattttgttcataaaatatgacaacaaaagtctgataagacttaaagtcgttattaatacaatactacgtacaaaagcagccctatcagccttatatactaaggaatttaacagtattccttctaagtaaacattaaaagtcaaaatgccagtactgataatattcattcctaatagaagccaatattcaattttatactttttatcaattttgctaaaaatcgtatgcatagtgtcacctaactctgactagcagtcaaaaatgttaaaatataatgaatataaaattagataaattttatattcttatttatcctatgtcaatactaaataaattgatttggttttactttcatgctgtatttgatattatgtagttactaactaccaaataactatctatcaactacagaaagagaaaaatatgactgaaaaagcagcaattaacatccgtgttaataaagaaactaagcaaaacgcagagaaagtattaaacaaactaggcatcccgatgtcagtcgcaattgatatgtacttacgacaaattgcattgactgacggcattccctttgatctatcttccaagaaaagaaaaaagaaaaatgatcacgaaacagcaatgatggtcgcagaagctacagctcaatatgaaatcgttaaatccaactgggaggataaattagctgagtttattcctgactggatgaacatgaataagatgactaaagaggagcttgaagcaaggttagctaagcatgcccaagatgcaagagatggtaaaagtgtcgagattagcaaaacttttagcgacctgaataaagaattaggaatttaaatttcatacaagaatatactgtcaaatcaagtcctaacgtatctgtagaacttaaagagatatatagctctatcttgcaattatctcgatctccaaaaactgctcgagattatgtaaaagatcttgaacaaactatgcaagcgttaaattattttccagaaagatatagaaaaactccttcaggaaaataccgacgagttaatttcaaaaaatacgctatattctactttatcgaaaacgatactgtacacattattgatgtcatactagcttcatcaagtacagtattcaaatattaatcctttgccccattctagctattaagctatactagacagaagaaattaaacaaattaagggacaataaaatgagcgataaattaattaaaattgcatacctctacgaagatttaatgaatacttacggtgactcaggcgatgttaaaatcttgagctttttgctaaagcgtgaaggctacgacactcaagtcgacaatatttcacttggcgatgacttcaatgcctttgactatgatttcgtcttcttcggcggtggtcaagactttgaacaaaccgttgtagccaaggatttaccacggcacaaagaaacacttgataaatacatcaacgatgacaaacctatgctctgcatttgtggtggttaccaactaatgggtagttactataagaccaactcaggtgtaacaattcctggcttagacattttgccacttcacactgtcttcaagagcgacaagcgaatgattggtgatacccgttacatgaccgaatggggcgaagttaaggcttttgaaaaccactctggtcaaacttacttcgacaacaaggacaagttgcatcccctcggcgacatgatcgaaggctacggcaacaacccacaagaccacgtcgaaggcctgcgctatcgcaactttattggttcatactcacatggtccactacttaaaaatactaatgtagctaatgccatcatgaaaatgattatcgcttggcaccaagaacgtgttagcgaagccgaaaaagtcacagaataaaaaagacccagtcagaatctctgactgggatttttcattatcaaattaatttaaaacacgtttagcagctgagggataaaagtaggcactgatagcctgctttctcaccccttgactaggagttgcagcgtgaacatattgtccatcaccaacataaataccaacatggtaaggagctgaggcagaaccccagaacaacaagtcgccttttttaagatgacttaatgatacgcgtttacctttagtaacttgaccataggtggttctaggtagtgtctttttagcagcctttttataaacgtattgagctaagcctgaacagtcaaaggctgaaggaccagtagccccataaacgtaactcttaccaacttgttctttagcaagttggactacggcgttacgtttttctgttttgctttgactagctgcttggacagtttgcgtttgaagtggaacattaatgaatgaaattcctgtaaaaaatactgacaaaactgtggcaaacttaactaaactacgtttaaaactcaatttatttctccttaacacttcttatctttcaatgttttctatattaccggagaaatattacagccttgttttaaaatgactactataaaattaagcaatgtaacaaaatctgctatttcttgtaaattttgcttaacttgaaaaacactataattttctatatgcttaatacattaatttaggagttttttattatgaataagatagatagttatgtacgccactttttaatactaatcgcactaattttagggctttcactcgtctcagaactgcgtgaaattattgcctatgactcatctacccttggtatcatctttttaactgctgcaattatttgtacttttgcttcaggaatcacattacaatttcataaactaaattggattacgatcattttaattctgattctttctacgattatgatcttattctggctcaaaacccacacttttggccttattgtcagcatttttatgatttacaatattattgtatttctggtttgtgctattaacctaatttttcaaaatgatgctgaatgattaaatcatatgcttaatcataggtaatacaatcccaattaccactaatccaccattaaacaaaaaacttattaatttcttttcaaaaaagtatttcttcataaaaaaagacctttctattatgaataatcaaatcttcgggctaaaattccgacaattacgaaaacaacaacatatcactttagccaaagcagcagctggtataacttcaagacagtctctaggtaactgggagactggcaaaggcgaattagcatttgagaaagttttactgctactaaaaaaaatcaacgtccagccaatagactttttagagagtagtataagtagttacctcaaacaaactacttcacaaatctctgcagcttatgttaacaaccaagttgataaattattgcattatgctaataagtatcttgacataagccatcgtaatcttacagacagagttagctttttacgagctgctgtggcatgcaattattacatggacctaacgagtatagatctaacaactagttctgataaactacggatcatctcccattttaataaaatcttgaatggagaagaaatctggaattttgaggatatttattttttaggaaatacacaaaatctgatgagtccacgtgacatttatagtttagcctattctttaaattattatcgtcaaaagcacaaaaacgataatagagaatggatcaatgccgtttataatactttgataaacgctgaatttgtacttataaaaacaaatattaaattggctactgatttagacttacttttaagacaaaagtgggatttaccagataattatgctttcgaaaaaattcgacaaaattttatgcatgaactgctaaaatatatttcaacccaagatgaaagtgcaataactcagcaacttcacattcttgaattagaacacctatctgatttaaaaactggttttgaaacagcatatgaacaagtaaataaaatatattttcaataaactctcctcctagttagtaatattatcttatttctaatattgttagcgctttttgccaatattttagcatttttctttttacaaatattagccatgatattttatattcgtaaactaattaagattttttgaggaggatataaagatgaaaaaatcaattaaattagttaatgtactttctgttagtgtactgactttaggacttgtagcacctgtaaccacagtttctgctgatactgctaattctgagaatatcgcagtaaaaacaaacaatgaatcaacacaaagtacagatacatctggcttagaaatctatgatcaatacgttcaagtaaatcctgaaaaaaatcaattcgaattatccaaattaggtgaaaaggttttaccaactactgtatcatcacagattcagagtcaattaaatgctaccaataaagaaattaaggctaataattttattattgaccctgaaaccaaagcaattgtaaaatactcaccttatattaactttgctgctagcgttagtggcgctgcgcgcttaagaagcggatgttatgttcgatggttctggtggggctttagattctactttacttcaaatgcagcagtaacttggtttagagggattttaggtggcgcttctagtggagccaccataggaaacttagtagctgctgcaacgggccatgctatggctgcaactacaatagaagcatttggtatgtacgctgatagtatgtctagagatttgtatgattataataaaaaacaccgtcgtagtaaagtatatatggatctgaatggtgtatttcaatattcatttcatacattctaaaacatttggagaaataacatggggattaaaactttagtatccgtcattttaatcattatagtcattgtactagcctgctcaccattttataaaaaatatcaattattctatttaaacaaagtaggctattgggatatcctaatccaattcctagtaattgcaggtatcaacttcttcatcggtttaaaatatggtctgggtgccctgtttttattgattgttcccgttccactagacattattttcttaatctcaatgatttattcttaccttaaaattagaaaaatgaaacgcaaatagctcttaaaaaacgaagcaaattattgcttcgttttttgattgatcttatttttcttctgtttcggcgttagattcaaagccatcgcagccacgacaaccaacactgatccgacccaatccatcggcatcattactaacccaaagaaaaggacagaaccaactgtagctgaaaatggttcaaaagcatctaataaacttacagttgatggaattacataccgcagcgcgtttgccataatttgaaatggaataatcgttccaattacaataactgccgcagtatacagccaaacttcaggcttattgggaactgcatgaaattgcggatcaattatcaacaaactgattccagcaaaaatcatcccccaacctgttactaccatactagaaacctttttaacaatgttaaccggaatcaaagtataagcagcctcaccaaaagcagacaaaacgccccaaaacagtgcaactggcgtaatggccaaatgattaaattgcccatgcgttgacaataaaaacactcctaaaaaagcacataacgccgctatgatatccaatctacgcataacttgcttgtgcgtgatagctaaatatcccaatacaaaaaatggcccaataaattgcaagattgtcgcaatcgaagcattagccacttgaatacacataaaataaaatagctgcactggcaataatccaaatatgccataggctataataaccaaaacattgtgcttatttttcaacgtagctattggtttttgctttaaaaatcctgaggcaattaataaaactgctcctgaaataatcaaccgaatttgtgttaaccacattggtgtaatcttcggactaatatcaaacaatcctttagcgaataatcctgacacaccccacattacagctgccattgctgctagaaatgtccacaatcttcgtgtttttgctggtaccatctcgttcacctttttctttctcattcacctaataattaaaccacaaaaataaggatacctactgggcatcctcaactttattgatgagtttttttaactttctttttcttaggtgaaatattcaaggccatagctgccagcacaactaaaatcgaaccaatccagtccattggggtcatcaccaaaccaaagcaaataactgaaccaacggttgcagaaaaaggctcaaaagcatctagcaaacttgccgttgatgccttgataaagcgcagcgaattagtcatcaattggaatggaatcagggttccaatcacaatcactgccaccacatctagccatatatgtggcgtattcggaatatgcggcatctgtgggtgcacaatcattaggcaaattcccgctgacagcaatccccaacctgtaacgactaaactagaaactcgcttcaacacactgattggaattaatgtattggtcgcaactccaacagctgaaagcaaaccccagaatagaacgctaggcgttaaagcaaagtgattaaaacgcccatgtgtcgccagcaatactacgccaataaaggcacagatggcagcaagcacatctattcgccgcattacttgcttatgcgttacagctaggtagcccattacaaaaaagggaccaacaaattgtaaaatcgtggcaatcgaagcattagcttgttgtactacaataaagtaaaacaattggactggtaataaaccaaaaatcccatatgcgataatcgtccacgcgtcatgcttatttttcattgtagcgattggcttttgctttaatacggcagctacaattaacaaaataatgcctgaagttaccattctaatctgtgatagccacattggtgtaatctcaggactagtattaaatagactcttagcaaatagacttgatattccccacattacgcaagctaatccagctaaaaaggcccacaggcgccgttgtttttgtgtaaccattctttttaatccccaacttttctaaaactaacatactctatcataacaaaaacgggctagcttgaactagtccgttaattttttattcatcgtttttcttaattgggtttctgctaggcattagctgcatgaatgtagcaacaataattaaaaagccaccaagcatgtccattgggccaaagtccgcatgaagcagtgaaactgacaggatcgttgcaatcagtggctcgagggctccaagcatccctaccgtacttggttcaatatactgcacactagataagtacattgtataagctaacaatgttccaccaataataatataaacaattacccaaacatcaactggtgcaagttttggcattggttgagtgaagtaaattggtaaaaaggcaatgcctgcaaccaacattgctgcgccgattactggaatcggcccatactttttgaataatttcccaggtaatactgtattaatcgcttcagaaaaagccgcaattaagccccagaaacaagcaagcggtgataaagcaagttgatcgaatctgccacctgtagccaagatgaaggttcccacaactgctaccacaattgaaatcgcatcaattcttcgtggccacatcttacttctcaatgaagaatatataattatgaaaactggcgctaaaaattgaatcaccgtcgctgtcggagcattgctgtacttgactgctacaaagtacgataattgtgagctccccattcctaagaaagcaaaaatgatcaacataatgattacttttttatcatgtagcattgccttgacttggtccaagtatttccaacaagcataaatcataagcagggcgcctgaaaaaagcaaacgcagacctacaagccaagcagtatttacattagtgctagaaaataaaaattcaaccgccgtacccgatgcaccccaaaaacaggcaccgacaacagctaaagtcaatcctttataacgctgattcacattcacacatcctttagattaatgtttttcattgtaacatgggctaaaggaaaagttcaatgcttctaaagttgatttaatctatataacgtataacctgacacgctagccaataagccgattgtaaaaagcaaccaagattctggatgaaaggcaattaaaacaagtgaaagaaagcctgctgctaaactagaattgcgttccattcgctttttgccaaaaagcagaccgcacataatgccaaacatagttagcacataaaatgagtcaactaacagtaacaaattctcaataattgctagatcacttggctttacttttacactcaaatcagtaaaaatctgagcacagccaaaaaataccatcacaaatgcagctaagatcgtgataaagctaatcgtacgaaaaactgacttcaccttttgagttggcgtttcatcgataaaggtttttaagaaaaactcgtgatctttttttgctactacagctctgcccgtcttcttgtcataccagttcaatagaccagaaccaattagcataatagcaatcacagcaaactggatgacaattaaacgcatgaaaattggaaaggcatagattaccgtcaataacaaaattactatatagatcagctctgcataaagaaagaaatgcagacgctgtttatttttgaaaatagtttggaatgtttttgaattaggatcttgcataagacttctccccactaaatcttattacgaaaactcaaccagaaatttgccccactgagaatcaagccaataacagtggctacttgcatgcttggctgcatgaaaagcaagatcagtgataaaacaacagttaaaacgctagacgcacgaattaatttacgatttccacctaaaataccgacctccacacaaaagagtaaaacaacatataggccatcaccaatcagccaaacattttcaaagagattggcaaaattaccggtaagcggcttagccaaaatgtcagtccaaagctgacgtgcaaaagcaatacttaaaccgatatttgcccaaaagagcaagaattcaaataagcgaagaaatacgtttttagtaaatctaatactagtcagtgtttcccagaatgtatcgtgttttttaatcactatccttcgatcaagaaaggcaccaattgaataataaatcagaattgcaatcccttgaaatgcaatcaaatgcataaaaactttaaagtcaaacatcaatgtgaatagtaaaactactacataagctaactcaaaatataatacacagcgactaaactttcgctcgctaagccagtgcttcaattctcttttattcatatgatcactaatattgccattcatattttcactctcttttaataattatctaattatgtaaaaattgtataatgatttcaaaattttgtctagtccttttataattgatttagtaaatatttttcgaggtaaattatgaattatcccattttaattactattttgatcttcttgctgtgctttggccgattcatttggatcattactcacgaacgtcgttccttacgcgctggagttagcttagttatcaccttatttagttttttatttttaggtgtagtcattctggttaatatcgctgaccttgatccacattacaaagactggattttgccattatttgtgattgcgctatttgctgtgatggctggaacgattatctttgcattaactttgatcattatgtttttctacgatggcattaaaatcattatcaaagaaggaaaccgctggacaaattatctttctctgggcatggggatttccattatcttcttcctatttttatatcctcttgtgggacgaattagtcatgatagctggttaaagtatccttatatttttctatggctagtcatcatctacttagtcactatcatgatgatgtatactttaacttcttggattaatttaattaattggcacatgccgcacttagactacatcgtagtgttaggcgctggcattatgggaacaaaggtaacaccacttctggcagcaagaatttcccggggaatagaaatttatcacaaaaatcctggctctaagttaatcatgtctggtggccaaggacctggtgaagacattcctgaagcagttgctatggctgaatatgctgaaaaactgggtattaataaaaacgatattattatcgaaaataaatccaaaactacccagcagaacttgcaattctcacatgcactgatgaaaccaaatagtcgcttctgtattgtaaccagctcctaccacgtgtatcgcgctctggttttagctaaacgtcaaggactcaagtgtactggttatggtgccaaaactaagtggtattttactttaaatgcttttgtgcgtgaattcattgcatatctggtaattactaagaaaatgcaattgactatcatcggttttctagcagctatcatgattgctgctgccgcatttcatttttaatttattgcgttaagttgagaaacttagcgttttttattgatttatcttttaatttttttataattatagtcaaatctatagaaagcaaggtgtaactatgaggattcgtaaaaacaacttgtcaaactgtcattagtcaggatgacgagtcctgactttttcaaaaaagcaggttacttatgtcagaaacaaaattcaataaaactcttcttagtgtcagtcatgtggatttttcctaccctaagcgcaatttattcaccgatctaaatttttctattgctaatggtgaacgtgttgctctagttgggcctaatggaattggtaaatctacactaattgacctaattcgtaagcaaatccaaccagatgatggacagattatttgtcacggtgaaattaattatgtacctcaagtcaatgatcaaactgtaattaatgactcaaagagcgctggtgaaaagcgattagctttaattgaaaatactatttggcttcctagttctcttctcttattggacgagccgacagtttacttagatgacacaaatatccagaatttactctacttactcaagaattatgatggagcaattctagtagctagccatgatctggattttatcaaccaactatgtgagagaactattattctgcagccaaataatgcagtttattacccaggaaattacgcacagtatctcgaacaaaaacaattagataaacaagccgtatacaattttaacgaaaagcgagatatattaaagcaacaaattactgaaaaagtctctactttaaagcaaaaaagtactgactataatcattttgctaaaacacaagacaatactggtcgctatccttcgcgaagccatgatcatgtccaaaaaggattaaatagtcggcttaagcgagctgaacgtgaactggctaaacttccagagaaacagcacctatatcaacatcaacttaaacttcctgaatttaaaaagtggccgactaaaatacataattactctatcaaaatagatcaattactcagtccccaaaataagactttattatctaatacacagttaaacttgcaaacagccgatattattggattaatcggccccaacggctgcggtaaaacaacattgctcaaatatttagaacactacattaatcagcagcaatctttgccaccagccagctacattggtttaaatacgactaaacaaaagaaacctgccacagtagcagatttctttcacgagactattttgagcaaaactgaagttaagcgtcttttagttaaaatggatatgtttgtcgatttgactacaagactcacggatttgagtggtggcgaatttgctaaattagcattaatcaagcagctataccttgaacaagaatctattctattacttgatgagccgactaactatcttgatccagaaagtgtgacggccttggcccaaatgctaaaacagtcgcatctcacttgtattattgcatcccacaattgcaaatttttaacccaattttgccaacaaatctataaaattaagcagcaaagactaattgaattgcactaaagcatttctcttaaacacatatttgctaagcatatcctttactatcctcatctatattaatgaagatcacatttggtgctgcagaagtttggtgcgtttctttattatatttaccaccataatactcataacgaggtttccccttgccaaaaggatctattcggcaaagaaagatcacatatgtcgctttgaattctttttccggagagccacctagcccgccatagattatttcttcctgataagcgttggcaacttccagaatgttttctcctggttcttgcgaccctacttgaatgattaacccgtatttattgcgcctcttgtctcgcgcaattacatgtacgattgctttttcatctaagacatttctatttggatcatcaagtgattttgcttcctgaatattgagttcgggaagcattctttgtactgctgtaagaagctgctcattatacttcttcataattcctgcggccatgtgatccaccattgccggtgacatttcattttctaacataaaaaaatcctcatttctaaaaatctgagagttttatccctctattacttattacgcaaaaaaacgcaaaaattttttcggaaatgaagttttttcaattttttagttttcttttctaaaaaatggactgagtagcgatacaagcaggccgtaaataaaataccagcgataaatatctgccaagtcttgattttgaatccacaaaattattgcaattactgtcagtaagccacctaaaaagattgttgaacccatatttttatcagtaaagaagctgatagcagcacctaaggtaattaacgctaccaaactataaatgacgataatcactggtcctttagtctgaacgttaacatcaagcattggtgcgttagtaaacagctgccacacgataaaaccagctaatgcaatgccacatagcaatactagtaatctaaaaacaaaagttaaagtctttttcattatttttctcctgtatgcataataatactagtataacagcaatatcgcggcatacgaaaaacgcttggatttttccaaacgcttttttactattcttttgcttgcataaattgttttctagtgatgtatttgattgatttaacgtattgccccttgtgttgaattgaaatatattggcctgatggatcgtagccgccaacctttttcaacaataaattctttttcgtcttaggattatacgccttcacattgtaataccgctgtgtgcctttatctacttgagcatagcttgtttcctgggaaatgaatggattcaatctatcagtaaaagagttatgaaatgaaaaaatgcagattactcccactactagcactagtgccgttacaaatgcggttttaatagtacttttattcataatattcaccttcatcgttcaactattgttatactaaaatagtacaccaattcagttactttaacaattgtttctagcaaaaaaacgcttgaaaaattccaagcgtctttcacctaagccaaaaatctttttatagcttcttctacactagcattcaatgattggtgcttcgttgcagcataattagccaatttttcatgtaatgaaggatcaatgcgcacattaaaattacctttaaaaggtttctctggtataactccatcttccttacagctcattagataatcatcaatggctccttgaaaatccttctccaattcatctattgtattaccttcgtaagaaataagactcttaatcccctgaaccttaccaaaaagaatcttatcctccaaagtatattcaattgaaccttcataacctttatacttcatatattgattagtttttttcatctttattcatctctttgattttatcttgaatttgtttgatttgatatggtaatagttcttttctaggatgtggtttatgaagaatgatccgatcactgccctttttaaaaataattctagatccactcgtttttcctttattatcgagttgataatctagttcatgcaatagtgttttagcatctttaaagtcaaacgttctgagactgtaaaatagtttgtgtaaggatgaatgattccttaaatttatttctttaaacattagaaaaaggagttcctttctcgtatgattggtttgaacaaaaaaaacacatacagaaagaagaactccttcatgaatgattttaccaaagattttgctcaagctctattcaatccagacaaaataaatgatttattgcgcaaagaactacaacaggctgttaataacttgctagaagctgaattgactgcctttctgggctatgatccctatgccagaaatggctggaatactggcaactctagaaatggtgcttatttccgcaaagttgatacgcaatttggcccaattgaagtgcaagtgcctcgggatcgcaacggtcaatttcatcagcacacgctgcctgactacaagcagcactcggatatcttggaaagcatgattatcaagctttactccaagggcgtgaccaccagggaaatagccgatctaattgaaaagatgtatggcagccattacagtccagctcaggtatcaaatatttccaagcagatgattccaaaggttgaggcttaccacacaagtttttctgcgtctatttggatgcgacataccttcctttgcgccgagaaacatttgagcgtgaagcagtctatattgccattggcatcaagcctaatgggcacaaggaggtcattgactactgcattgcgcctagcgagaacattgaagtctggacagatatgcttcaaaacatgaaatcccgaggcttaaagcaagttgagctttttctttctgatggtgttgttggcatgaaaacagccttagctcagacttatccaaaagctcattttcaacgctgtttggttcatgtcatgcgcaatatctgcgctaaagtacgcgtcgacgatcgtgaaaagatcatgaacgaattcaaacaggtgcatcaacagacaaacaaagaagaagccacagctgtcctgcatgacttctataccaaatggggcaaggtttacagccatgttatcagaagcttgaaagacatagaaccagatctgctggtcttttataactatcccaagcagatcagagcttcaatttattcgactaacatgattgaatcatttaacaatgtgatcaagcgcaaagctaagcctaaggcagagtttccaactgaacagtcgcttgatgcatttattggcatccaggcaatgagctacaatgaccgttatttcaatcgaattcataaaggctttggtcaggttcaggacaccttagaatcctactttgattaaataaataattaaaaaatcaatttacgagaaagaactatttacacaaaagatttgacagtttcaacgttcttggatgactatataactttattaatagcttttctaatttactcacgttatcctcacttaagtatataatataatatatcatttgtaactaaatttgcaactaagacaaattatacctaattcgctaaattcacgctactaaaaaagcgcttggaaaattccaaacgcttcttttgtttaatcatctagacctaacttcttaaagatatcatcaacatgacgcaaatgatagtgataatcaaatgcatcatcaatatcttccttggataggtaattcataatttcactgttttcaaccaatggcttaaactgcttttgctcattccatgatttagcagttagcttctgtaccatatcataagctttttcacgagatagacctgcttcatcgatcaacttaagcaacactcgttgagagtaaattaatccatatgtacgatccatattcttaagcatcgtttcagggaatacatctaagttagtcaaaattcgattgaagcggtgcaacatatagtcgacgccaatagtcgtatcaggcaagataactcgttcggcacttgaatgagaaatatcacgttcatgccataacgctacatcctcgtatgctgtaacgacatgtccacgcattactcgagccattccacagaggttttcagatccgatcgggttacgtttgtgtggcattgcagatgatcccttttggccagcgcggaaatgttcctcaacttcatgaatttcactgcgctgcaagccacgaatttctgtcgcccaattttcaatactagtagcaatcaatgctaatgtcgcaatgtattctgcatgcaaatcacgaggcaatacttgactagtaattggctgttgtgtcaaacctaattgcttcattacgctagtttcaactgcaggtggaacattagcaaaagtaccaacagcacccgaaattttgccagattcaacgccttttgcggcatgttcaaatcgttcaatatcacgattaatttctgcgtaccagcgagcaatcttgagaccaaatgtagttggttcagcctgaacgccatgtgtacgtcccatttctactgtgtacttatactttttagccttttctgcaatagttgcttttaattcgtgcagatcttttctgataatctcatcagcttgtttaagtaagtagccttgagcagtatcaaccacatcagttgaagtcaaaccaaagtgcacccattttttctcagggccaaggctttcagacacagttctagtaaaagcaaccacgtcatggtgggttacttgctcaagctcagccacacgctctgcagtaaagctggcattcttagcaatcttctccgcatctgcttctggcacttcaccgagttctgcccaagcctttgttgcggcaatttctacttcaagccaagctgcatatttattttcgtctgtccaaattttccccatttctgggcgagcataacgttcaagcataaattacatttcccatggattcttcaaaacaatagtttgttcacgatctggaccaactgaaacagttaccaaaggaacgccaaccaactctgaaacgcggttcaagaatttcttagcattttctggaagagcgtcccaagtcttaacttgagtaatatcttcatcccaagctggaagttcttcatatacaggcttacatctgtataattccttcaaacttgctggataataatcaatcttttcaccatcaagttcatatgcagtacaaatcttgatcttgtcaaaacctgaaaatacatcaagcaagttcaagctaaggccattgataccagcaacacgctttgagtgacgcaatgcaacggagtcaaaccaaccaacacgacgtggacgaccagtaacagtaccatattcatgagcagtttcacgaatacggtcaccaacttcatcaagcaattcagttgggaaaggacctgcaccaacacgagtagtgtaagccttgcagacaccaattacagtatcaagacgattagcacctataccaatacctgaacaaataccaccagaaatagtattagatgaggttacaaatggataagtaccttcatcaatatcaagcatcacaccttgcgcaccttcaaataaaactttcttattttggtcaagtgcatcattcactaagacagaagtatcagttacatacttcttcattctttgaccatattcatagtatttatcaaaaatgtcttcaaatttaagtgctggcttaccataaaccttagtaaataattcattctttacttcaaggttagcacgcaatttttcttcaaaggtgtctttttcaagcaaatcacaaacgcggattccaattcttgaagccttgtccatgtaagttggtccaataccattcttagtagtaccaatcttgttagcccccttagcttcttcttgatattcatcttgcttaatatcataaggcataatgatgtgggcacgattagaaattctcaagccactagtatcaatgccactcttttcaagattttctaattcgccaaacattacttctggattgattacgacaccattaccaataactgtattgtccttggctgcaaaaataccagaaggaattaaacgcatcttgaaagtttgaccattaatatcaatagtatgacctgcgttgttaccaccatttgaacgaactgcaactgcagcatccttactcaaaaagtcagtaatctttcccttaccttcatcgccccattggcttcctacgactgcgactgctgtcatttaaaattcacctcataaaaatctctataaatattacgtatgctagtctagcaattaatttacaaataatcaatataaaatccgaattattttatttttaaattatttcatagttcgatttttatattgacaaacacaaattattcccatatagtatgtctcggtcaacaaacaagattaaagggagcagttttaaaatgagtaactactttagtatggaagcctttgactatgatgatatccaacttgtacctaataagggtattatcaaaagccgtcgtgatgcagataccagtgtcaaattcggaaaccgaacatttaaaataccggttgttcctgccaatatggaaagtgtcattgatgataaccttgctatttggctagcccaaaacgattattattacgtaatgcatcgttttgaacccgaaaagaggatttccttcatcaaaatgatgcatcaaaaaggattattcgcatctatttcagttggcattaaagacagtgaatatgattttattgatgaattagtcaaggaaaaccttaaaccagaatatattactattgatgtagctcatggtcactccgtttacgtgattaagatgatcaagtatattaaggaaaaattacctgattcatttttaacagcgggcaatattgctacgccagaagccgtacgtgaactcgaaaatgcaggcgccgatgcaaccaaagttggtgtgggacctggtaaagcatgtattaccaaattgaagactggctttggtactggtggttggcaattagccgcattaagaatgtgcagtaaatctgcttctaagccattaattgccgacggtgggattcgtcataacggcgatatcgctaagtcaattcgttttggcgctaccatggttatgattggttcaatgctggccggtcatgaagaatcacctggtaatgtaatcaaaattaatggtaaaacttacaagcaatactggggctcagcctctgaggttcaaaaaggtgcttacaaaaatgtagaaggtaagcaaatgttagtgccataccgtggctcaattaaggatactttaaaagaaatgaaggaagacttgcagtcatccatctcatacgctggtggtcgcgatcttaattccattaagttagtcgactacgtaatcgttaaagacaatatttttgatggtgataagtaattttaataaaatttttgcatttttattattttcctgttaagaatattacgataatatagtattatctatcttttttcgatagaataatataagtcgagttattgtagggtagtcaataactcggctttttttgattattttttaaaaacgattggacagagttttaaattgtgttatactagttgtcgttgatgaatgcgcccttagcgcaactggatagagtgtctgactacgaatcagaaggttgaaggttcaaatccttcagggcgcacttaaaaacgggaaatggctcagtttggtagagcacctggtttgggaccagggggtcgcaggttcgaatcctgttttcccgataagttagccgcacttcattgaagtgcggtttttttgtgtaaaaaaataagtattccctcggaaatacttatcatgctatgcccctttagtagctcgtctaaagataatctgtgtatctgaatctacatatttcaataacggtaaatcgtaatccttaacctgggccaaaacatttactttctcattgcatggcaaatcgcgtttagtaatctcgatttcgccttcataacgcggatacaaatgattatcaatcgtcacgctgccagttggtctagcataaatattatcttgcggctctgttgacaaaaacatcttttttctgctttcctttaagcgaactacgtcacgcgccacatctggacgattatgccaatcattaccaaacaattctggtatatcagtatctaaatgcagtgtaattgcaccctgtttttgataattagtaatcgattcaattgcatccctcgtaagttgcggatctcccacaaaaatgtgatcgcaatcataatctttcaattctaagatcgcagctaatgggttttcatatcgctgcttctccaacgttggcaatcctgcaaaaattggtccacgcaatttgccatttcctgaaataaaggctgctgttttcaaaccatattgcttaagccactcattcttcttttgcatccagtgtgcatcaagacctgtttcaggacgtgggtagaagttatgtcctgctgttaatttttcaaaatttgcattgctataacgcagatcatcaatattttgttgcgtaataatgctggcatttagaactatcggcatttctttggacaacttggcaataatatcagtagaaaatccatgatctactctaagaccagttagactcaaacttttaatttgctcaacactattgacattaatacccaaatcttgcagatcatctgccgtgacatctgcaataattttcaagtctagtttttgacaccaattagttaagtccgccagccgatttaaaatcgtctcactatcagtatcaggtacagctagctgagtaaaaacgcaggtaaatccactattgcgcatcgtcagcaaataattgtaattctcggacgtcaaatcgtgtcctagataaacagaaaatcctaacattcttattcctctaaaattaattaatttcttttattatctatagcttaaacgctttcttaaatatcttactacattttttgcttgcttttttctaaaaaataatgttaaatacatataaacaaattaaaaagcgatgaaaaagacgagtaaataatctaattctttccagtgaattagtgctagtgtgaaactaatagaccctggattattgaaaaacacttttagcagctcactgaaacaataattcttagagtaggttgagacgtctccggtacgttaccacgccggtggagcatgatagtgcttcatgagtcggtctattaaaatatagacaatgtgggtggtaccgcggaaaaaagcctttcgtccctgtttttttagggagcgaagggctttttctttgctctaagtacattagaaagaggacttatattatgacacttattttacctaaagattatcacccaacattaactgtgcgcgacactgaagctgcgattgtatttattcgtgaaaccttccaagataaattggcagaaattctcggtttacaaagaatgtcagctccaatgtttgtcgaaaaaaagaccggcttaaacgacaacttaaatggtgttgagcgtcctgttgcctttgacatgaaggcaatgcctaaagaagatactatcgaagtagttcactcattggctaaatggaagagattggctttgaaacgctatggtttcggaatgcatgaaggactttacaccaacatgaacgccatccgccgggacgaagatcttgataacttccactccatctatgttgaccaatgggactgggaaaagattattagtaaacaagaacgcaacaccgacacacttgaagttactgtgatgaacatttttaaggcaattaaggcaactgaaaagctggttgctgcacgctacccaggctctacttatcgcctagctgatcacgtttcatttattactactcaagaattagaagatcgctggcctgatctttctccagaagagcgtgaagataagattgctaaagaagaaaaagccgtctttattatgaaaattggtgacaagttaaagcgtagtggtgaaccacacgatggccgtgcaccagactacgatgattggcaattaaacggtgacttagtcttctggtatgaaccgcttaacagtaagattgaaatctcttcaatggggatccgtgttagcgaagaaagtttgcgtgaacaattgaaaaaagctcactgtgaagaacgtgagaaattaccattccaccaaatgcttttgaagggtgaattaccttattcaatcggcggcggaatcggtcaatctcgtctctgtatgttgctgttaggtaaggctcacattggtgaagtacaagcttctatttggccagaagatatggttgaggcttgtgaagctgacgatattaagttgctgtaattttaagatttttttacataccaaaaaagatcctgcaaaatgtaggatcttttttctattgattttatttccgttctcttctagaaatccaagccataatcaatggcaacaatacaaagccaaagaccatcatcgcaatggcataccagttaacaccgataacttgccctgctgcgtttactacaccaaattgtgccttccagttatattcaactaacaagaagatcacaatcacaccagataaaattggcacaataacatcagtcataacgctcttattagcctttaagatatcttcttttgccttaccacggtaaaattgaataactgctagaggtaccacgatgaaacctaagaatctaaccatcgcgctcaaagtaatcaagttgaccatattgtattcaaaggccatcggaatcaaaattgccaagccaacagagataaagaaagttctaattgggaagttattcttagttctcttagttaaagcttgtgacatctgaccctcacgagccatagcttccagaatacgtggagcattaaagctggaagctacgttgatcccaaacattgaaaccaaggcaccaaccaagattacatcacgtaagatttcattattaaaaatagccgcaatcgctacaacttgcttagttgtcattaaagcacgtggattaagtaccatcgctaccgctacaacgccgatatagacaaccgcaataattaagattgccaatggaattgctcgtggcaagttcttttcagggttcttcatatcttctgaaccagaagctactgattcaaagccggtaaaggcatagaaggctgaaacaattgacatgacaaaggtagttgtagttaaagttggcacaattttctgaccattctgagtcaattgatctacttgccctaggttgcttgatgcaccagtagtaattaacaaaactactccagcaataataattaataccaatgcagccaacttaccgatagtagctaaattcattacatacttaactactttttgaccaaacaagttgatcacggtaataattgccatcaagatcaaaaagccaattgtgacatttattgccttattgggatttccgccaaaaattgaaatagttgacttaattaccccaacagccattacgccccaagctacactggctgagaagtaacgcagaactcccatataaaagccaatttttttaccaaaagcggccttggaataagcataggcagcaccagatttagtgacatactttgaagctgccgcaaacgaaatggccagaatcgctgcaaaaattgccgcaattaaatatacaactaaagctttactaccggcttgctgtaccacactaccaggtgttaaaaaaatacctgaaccaataatggcattaatcgctaacagcacaattgaccaaaagcctaatttatctcctgttttttcagtcatctatttgcttccttactttgcattatcaacaacaaacttaaataagttattcataaacgctacatcggaattacggtgcaacatttcagggtgccactgcacggcaatgacattaccttgtttattttctagcccttcaaccacaccatcaggagctgttgccactgcttttaaatctggtgcaacgtctttaattaattgatggtggaaagaattaacgcgaaattcagttttgcccaaaatttcagccaatttactatcagcttccacttccatactatgagtaggcaaagttggcgtatgaccttgcatgtgtttcaaagtaagttcttttctgtatgaaagatcttggtaaagcgtaccgccatgagccacattaataatttgagcaccacgacaaatgccaagtaccggaataccattttcttctgctaactttaacaagcgcatatcaaaatgatcgcgttcaggccaagtagcaccaatcttttgcattggctcctcaccataaaaacgtggatcaacatcatgcccaccagataagatcaagccttgaacatgattaagctgttcacgaatcacctcatcattttcagtaaatggaataatgtaaggcacaccgccattttgaactactgaatctacatagtcttcgttcacataactacgatggtatcctgggaaaattcctctatcgtcaataattacagaacctgagataccgataattggttttgtcatttatgctcctccttctgcttactttttgtatgtaatattatagagaaatttatgcaaaaagtacaattaaaaaattgcattgttgtctataatttttgcatatctttaaatatagtaaaaaacagcaagccttatttttagctcactgttttatgctatttataccaaattccaaaaaggatttccattacatgctaaatatgtttctagccactgtttaaaagagaaatcaaaatattgttcctctattccaggatacgttagataggactgtttttgattgtagcgatctaaattaatgcccatttctccctcgtctcttaaccaaagtataggtagataattaggtgttttaactaactgatttaagacatactcaatagtgtaaattctacaccttgctccacctaattcgatgccttgaaaagaatcaatgaataattctgcaccgttagcctgtatccaaaactctatcaaatcatttgggacagatatgcctgacaacctatttattttattttcagctactggcggatttaatttaaatttacagtaatagacgccaccaaaaccaaatattggtacgtcgacactgcattttttactaatcaaatttatattatctattatattatccattttaataattaataaaccatttagttataagcttatgtgcttcaattggtactggcattaagttgtcaaagtcattatttccaccataaattctaggtcttatatgatgaacttgattttcagcccaatactcttttgattgattgccataacgctcactaaactcttttatatagtaatatctatccatcgtagtccatactggtgaagaaggaagtctagaccaagtagtattgattggtgtttctgcatcttttttagagacaggatcaacatattcaggaaaattttgaccaattttattttgtaaataaatagaactaagtgaaattggataagtagcgctatttccattatagcctaccattccccatgctcctccaacagcaaaaaatgttgtagcagctggaaatacagcagaccctaacaaaccagtagtaatattgccttcttttacaattggactagctgtatttgtagtaattgggccggacaatgatggttcactatagaattgcaattgaactgaaattgcagcaggagctggaccagttattgaatcaatataaaaattgattttaaattgtccatctacatactcttgtgaagtatgaaatttaacaactgtatctggaatctctgccaaaaaagtatatgcagagtaatggctacttgttgcattaaaattattatgaatttttacagttccattttttaaaatagggacatctttttttacattttcattctttaacttatcttgagctaaagaatgaaaattttgttcattagctattttagcaacattcttatttacatcatttagcgagtcagcctttgcatttgtattgatagctataaagcacacgatagtggctaaaaaagcaaataactttctgtatttcatgtttctttcctcattatctataatttttaacacaattataaggatctttctattattctaccatacaactctatcacataagcaagtgctcccacactgtagcatcagatgctactgggatttacactctagattgatgtatacgaagaacacaattacaatcagaataacatgaaatactactatagcgacaatttaaaatatacagtaaaatctttaaactgtatttcttattctaacccttgttcaaagcgatactgccgtaatacatattccttgaaaaacggtaaagtaaaggccacttcaccataattagtagatttgataacttgatcatctaacaagcgtctacgatagttagcaacaaaattgcttggacggtttaacctttcatgaatttctttaattgaaacacaatgttttgggctctgagccatagctaaaacaaattttcggtcttgctttgacaaactactaagtactttggtataaacattttgctttagcaccaataagtactctgatttaatacattctaaagtgttttgatctattaccttactttttttagcagctttcaaaactaaataacctagcaactgaaaggcatatgaatagcccattgtcatcaacgccattttttcaagaatttttttcgacacttgataacctgattctttaaaaactttactatagctagcttcaacctgtgagagattcaatgctgataaagctattcgctttccacgtagtaagaatgaagttatattttcgtttttcaattcagagatattttcagaaagaccagctatcattaaggctataggataaccctgccgatttaataattgataacatcttgcaaaatctttcaactcctgacatagttttacttcgtctaaggtaatcaacactttaacgtcattttttcttacttcatcaaacatgttcgttaaaatatcttgatatgttaacttactaacgtctgtagaaagcgataatccaaaattagagaaatttagtccttcaatagatttaaatgatttttttagttttgaatctgcattcagatataagctattaataaaagaaggcaacaacttcatccccatggccaaattaacaacaatccaatctggatatgcactaatctttctgtccattgctgtcaaaaagacagttttgcctattccacgcattccataaacaatcgaaattgtatatgaactatttaaattctctattccttgagacacatcagcaattagtttttttcgctgcaaatacactgctggaattcggcaaaagctaggattaaacggattatccatattttgtccccaatcattttcttatcaaaaaagcagcaggcttcttacctactactcaattttatttatctttttgatgcttaaccacataaatcagtgccgcaataatcaacactgctgcaccaaccgctactgaaatttgcgtctccggattaatgaacatgaagacaacaattactaccagcataatcaaagcaaagtaatttgaatatggataaagcggcaatttaaacgggtgattctccatcaagtgtggattctttcgtctaaagcgtaactctgctagcaggatcacaaaccaagctaccatccctggcaaaacagatgaactatagacaataacaaaaacattagccaatgatttattcaaaaattgggctaacacattaagcataaaaccaacgaaaattccactggtaattccaatgatcgcatgactaggcacgattctcttagatacgtgaccaaaagtcttaggtgcttcaccttcgtgtgccaatttatacaacattcgacttgatgaataaattcctgagtttgcaccggacaaagctgcagtcaaaactacaaagttaattactgaagctgccgcggtaattcccaccttggcaaaggtcgttacaaacggtgagccaatgctatctaatttattccatggataaattgtgacaatcacaaaaattgccccaacataaaagatcaaaatccgccacaatactgacttcacgcttttaacaatggccttatgcggatcagatacttcaccggctgaaatcccaattagctcaattccttcataagaaccaacaataatggccattgagaaaaagaagcccttgagaccaccagtgaagaagccgccatgactccacaggttagaaaagcctactggatgaccgccattaccaaagccaaatagaattaccgcaaagccaagtaaaatcattaagataatcgttacaaccttgatcatggcaaaccagaattccaaggttgcataagctttcgcactagctaagttagccaccagcaaaaataaaataataattacgccggcaacccaatcagaggtgcctttccaccaaaagcgcaaatactctgttgttgccaccacctcagaaattccgacaacaatgtattgaaacacgtttgcccattcggctaaatagccggcaattggatgcacatgctctgaagcatagtctgcaaaagaaccagtacctggatcaacataaagcatctcacctaatgcccgcattacgatatacaaaataaccccaacaaaaatataagctagcagtactgaaggaccggtccacttaatggttgagctagcccccatgaatagtccaacaccaattgctcctccaagtgagatcatttccatctgtccggctgtcatcgaccgctttaattcaggtgctttcttcgccatttccaactccctttctttagcatctgtaaaaatttcctaggaaatatatctattctcatttatctttaatcactataccttatcattttttcgaacaaaactgtagctgatcgctaaaaagattgcaaataaaatcgaaataatcaaagccagctgcgttgatttgataaagaataataagattaaaataccaatgtaaaaggcaagcgtaagccagctagttactgggtagcccggcattttaaagctgcctaaattctgcttattctgtttgcgataaacaatatgtgctgccataatcatgatccaaacaatcacaaaacaaatcgttgaaacagttgagacaacggagaatatttctgctggcattaaatagtttaaggcaactactacaaataaaattaatgaagaggtcatcaaagcgttcattggaattgcttttttggtcaattcacctagtcttttaggtgcatggccgttacgtgctaatgaataaagtgatcgactagttgaaaagattgcactattagtcgctgacatagctgcagtcaaaacgacaaaatttaaaatccctgcagccgctgtaacaccgatgccggtaaagacctggacaaagggacttgaagtagttgtaatgtgattccatggataaacagacataattgccaacattgagcccacataaaaaaggccgattctaactggcaaagtgttaattgccttaggaatatccttttgcggattagctgtttcactagcagtttgacctacaatttctaccccaacaaaggcaaaaacaaccatttgaaatgataaaagaaagccccaaatcccagttgggaaaaagccaccatgattaactaaattagttagtgaaacataaccgccctttacatgcgtatgaagtaacaacattacagcaccggtaatgattaagactacaattgccattaccttaatcattgagaaccaactttccagttcaccaaataatccgacatttaccatgttaatcaacatcaataagatcacaattactaaagggccaacccattgcggtagccacggaaaccagtatcttaaataaattcctgtcgcagtcaaatcagccatagctaaactaagccagcaagcccagtacatccagcccgctacaaattcggcacgcttacctaaatattttttgattgactctaaaaatgaatgactatcaggatcggctaaaataagctctcctaaagcacgcatcataaaaaaggtgataatccctacgattaagtacgacaaaataattgaagggccagcactatgaatggctgaaccagaacctaagaataggccagtaccaatggctccccctattgcaatcattgttacgtgacgactcttaagcccgcgttttaatctcggcttctcatccataattactcacaccttcctcaaaataaaaaatggagcggcatgttttttaaatgaaacatgttgctccatcaagtttgctttttttgaattatatagtcttataccaattcatgcaattattttttatctaaaaaagatattcccttaggaatatcttcattattagtaaactttaaattggttcaacggccagtaacgtactttaactacgccaacgatactactacgcttaatggttccgatataacggctatccttagaaacgctccggtgatcacccattacgaaatatgttcctttcggaatgcgcccagtatcctgcacatatttaatctgcgctctagtaaagtattgctggtaagtccgcgcccgcatcagtgactgcatagtaaaattctgagtctcagaataaaatgtatctgagccattatcaattaacttcgttccttgtttcaaccaaggttgagcaatctttttattattaatgtagatttgattatttttgctgacgattttttcaccaggcaaaccaataacacgcttaatgtacaaagcacctggttcatctggtgctttaacaatcactacttcaccacgcttgatttgcgcatgacgctcagcgattagccgatcaccattttgaaaagtaggttgcatcgaaagacctgatactgtatcgttgctcaagacgaagtggaaaagcagcagataggcaccgatcaaaataacccagataattaagatatctaggaaaaacttaccccatgattctttttcttcttttttctcagccattatttttctccatttatctttttccacagtttacaactttatggagaaattgccaaattacaaaaaagaggtatttcctcggaaatacctcttttattattaatgactattaattagtcttcttttttgtcttcagttttagcttcgtctgaaacttctaccgttacacccttcttagcaagaacatgagacatcttcttcaagtaaatgttaatgatcttgcccatgtcttgttcagtaagtgagttgaatggaacgattgcgtccaaacggttcaagaattcaggtctgaagtagttttcaagggctgagattaacttgtcttggtcaaccttgccatcttcaagcaacttgtctgagaagccggcgtttgaagtcataatcaagatagtatccttgaatgaaacagttctaccttgtgcgtcagtcaaacgaccgtcatccataatttgcaataatgcgttgaagacttgtgggttagccttttcaatttcatcaaataaaattaatgagtatggttggtgacgaaccttttcagttaattgaccaccttcaccgtagccaacatagccaggtgctgaaccgatcaacttgttaactgccatttcgtcttggtattcactcatgtccaaacggattaagtgttccttgttaccaaataattgaattgccaattgtttagcaagttcagtcttaccaacaccagtaggtccagtgagtaagaatgaaccagtaggtctgtcgctgtctttgaaaatttgcttacgagcaatagcgtcagtaattacatcgatagctctgtcttgatcaataacattcttcttaagtttcttagctaagtccaagttcttttgagcttcatcagcgtgaagttcactcattgggatcttagtcttttgttcaataattgcgtagatgtctttttcagttacttctggagtattcttagaatctacattcttaagttgtttctcaagttcagcaatcttactcttaatttctgaagccttgtcgtaatcctctgccttagcagcttcagtcttcttagcttcaagagctgagatttggttctttaagctcttttcatcagttgattgtacaagcaatgccttcttagcaccagcttcatccatcaagtcgatagccttgtctggtaagtaacggccttgaatgtatctttctgataattcaacagctaatttaagactgtcgtcactgtattttacgtggtggtagtcttcgtacttcttctttaagccttccaaaatcttaacagctacatcagtagatggttctggaacttgaacagcttggaatctacgtgataaagctggatctttttcaattctttggaattcactagtagtagtagcaccaattaacttcaattgaccacttgccaaagctggcttcaagatgttagctgcatccccattgttgttttctgaatcagtagaaccagcaccaacgatgttgtgaatttcatcgatgaataaaacaatgttaggatcgctcttggccttgtcgataaccttctttaatctttcttcaaagctaccacgaagacttgaaccagcaaccatgtcattaatatttactgaaatgatatgcatgttagccattttagctggtacattacctgaagcaattctttcagctaaaccttctacaatagaagtcttaccaacaccagcaggtccgattaaaacaggattattcttcttacgtcttgaaagaatttcaattacgttatcaatctgttcgtcacgaccaattactgggtcaaatttattgttcttagcttcctcaactaagtcaacaccaattggcttttcattgggttgttgtgggttctgttgaattgtttgtggtgcagcacccatgctgctggagtaattaattggaattgaacctgaactgcctttgctatttcttctgctaccaaagtcgtcattaaagaatgagctattcaattcgttaaataagttatcaaaatcattgtcaaagtatgccatatgtgcaacactccctatctcaaatttacgtctttagcactctagcttatcgagtgctaactcattacatttaatagtatagcaggttatccacagactgcaagctaaaaaacaaaagttttacacattttcctttatttttgtgatttttatttaaaaaagcactacaaatgctgcaatataaacatttgtagtgcttcacaaattataaagaatttcttaagatgggcaaaaattgatgattattttgcttaaaactgttgaattttaaggaagttttccacagataagaataagtttattaccataaactatttctgcctacctctattattgcccttttgcttgtccagtattttgcggttcgctcaactttctcggcccaagaaaatactgtttaattactttgattacctgcttattctgaggtaaatccgagtgatccgcttctacacccgttactgtcattgcagtatagctcttgacttgattctgaaaaatatattttccggctgctacgctagcttctggtacaattccatcagactcataattttttccaccagataaggaataaacaatcaagtttttcggtagtttatctttgttcttgataaagttttctagcatttgcgttttatgattaatatttttttcaccaaaattatatggcgttcctagcgtcatcagacgtttgattttaatttcatcagaatagtaacagtagtaatgttctaaccaataggtccagatcaagccaccgttagaatgcccaaaggctttaaaattattaaacttatagctctctgataaggcataaaaggcttgatcaaaccagctggcttgcttcttaatattgctataaccatcgtgattattttcaaaaccgacaataatgaaaggttcgttgtcgtttttattaattttgcctgaatatgacagcgttccattcgttgaaactttaattttaagcacgctatgcttagtcggtgtgttctgatttagctgcttcactaattggttaaaacgttcagtcgttgcactagaacctggaatcataattactggtgacaaaagcgatttgcgtctttcagctctagcgtggttatcagccttcatccaagaataacccggaatagccaaagctactaataagactaagacgattgccaaccatttaaaattaggattttgaactaaattaatcatttttttcttcataatcctttagtcccctttcaagtcgcaaacctaatttcatagttggaataaacattattatatccaaaatgaataacaaaatagaaaataccaagttgctccaatcaccattggaaccaaagaaagagaccaaaattcctggtgtcccacttaaaacggggtaagcacaaggttgaattaaatggcaaaaaattgctccagcggctagtagaatattaataattggaataatcacaatcgccggcagtaacaatggatttaaaataatcggcatcccgaccatcatgcctccagttgagcccaaagctgctggaagcaggttaaccttggcaatattttcactatccttatttttactataaattaggataattacaatcatcgctaaaacaatactcgcaccacccatttctgcataaggataaaacaaagaactacccaaatacttatatggtacattccaagcactcccatgttttaaggcaaaatttaagttagctgctgctgaaatactattagaagtagttgacaaagaagctagaggataacctattcccatccagctaagtaaaaagactgggatagtcagtaaagctattaacaaaatattatttgattcctgtatttgagtaactaggcctttaaaagtactagaattcaagaatttgatttgaaattcataaattataatccccagaactatcccacaaaaaattgcaaatattgtcgggataaacgcattccaggctctttccttaattctagcggcatgttcaaaatcgactggcttgtgttcctttcctagccaatgaaaaatttgccctacaccatagccaattaacaaggccagcaagacagcattaatttttaaaacactggaagaaaatggtgaatgatcgctggcattattagctaaattattggcataagcacaaaacatgataacgatgacagccgtcatcccggccatggttgaatctttacggtataaacgcgcagtataacgtgccgcaaaataagccgcataaataccaaataagccgaaggttacccgaaccatcccccgactgacaaatgctcccgcataccaaaaacgatctggcaaagtgatatcaaaattaaaaatattgtaaataaaactatcgggcgaaaaaacggcatctctgaacaacttaaaatatgccccaattaccgcgatcggcatcagcataaccaacgttcgctgaaaaattctaaagattgccaatcttcttagtttaagaaagatatttgtgattctgtttaccatggtattttcctttacctatctattctaaatatgattgaataaagttaattaaaacaattattaattatacatctatactagaaagctgattatgatggcttacattaacttaaaaaataatactaaaatttaccaatctggtgacacaaccatctatgccaataagaacattactttttctatcgataaaggagaactagtcattattctcggctcatcaggagctgggaaatctactttgcttaatattttaggcggaatggaaccaaatacaagtggcgatgtaattgtagcgggaaaaaatattgcaaaatataacgctaaagaattaactacctatcggcgcaacgacgttggctttgtttttcaattttataatttgattcccaacttaacagcaaaagaaaacgttgaattagctgctcaaattgtccctgatgcgatgagcgccgatgatgccttgcagtatgttgacctagggcagcgagaaaacaattttcccgctcaactatcaggcggtgagcagcaacgtgtggcaattgcccgagccatcgctaaaaagccagccttacttttgtgcgatgagcccaccggtgcccttgactataaaacaggcaaacgaatcttaaaaattttgcaaaatatgagccggcaaaatggctcgacggtcttgattgtaactcataacgccgctattgccccaattgctgataaggtcatccgtattcacgatggaagtattcaaaaagtccagcataatctacatcccgctgatattagtacaattgaatggtaggtgggcgacatgcaaaaaactattctatggaaagatgcttggcaagcaatcacccattcacttgaccgttacattgccattattctattaattgcactggggacttttgcctttacaggtttaaaaatggctggtcctgatatgcgagcaacaggggcagaattttttgccaaacataacttagctgacgtcactgtcacttcaaactatggcattaattcaactgatcgccttactattcagaatttaccggaagtaaaagaagctacttttggctattttcaagatgttaaaattaaaaatcaacctgatacgctccgcatcttttctcaatcagataatctttcaagttatgaattgattaaaggtcattttcctaagaataaaacagagattgcactgtcatatttattgcagaaaaaatatcgcttggggcaaaacattacttttaataaacctggcattttaaaaaataagacttacaagattgttggcttcgtcaaagctagtgagttcttagataaaaatccaatcggtcaaaccaacattggcagtggccatttaactggaattgcggttgctaatcataacgccttcgccgcaccagtttatcaaattgcccgaatcattttcaaaaataccgccaatttaagtccctttggcatagcttaccgcaaccgtgtttataacgatcaaaccaaattgcaaactgctttaaaccaaaatcgagccgacaaatatgacaaatatcgggccatgtatcaaaagcaatatcgacaagctgcagctaaacaattacttaaacgtggcatcgtagttaacccggcgcaaatcaaagtaccacagaacaagcttaaaattgcttatcctaactacgtaatcaacagccgtgaagaaagtcagggttatgcttcttatcgagcagattctgaacgagttgaagttttggctaatgtctttcctgttttcttgtttgctgtagcggctttggtcagcttaactacaatgatgcgttttgttgaagaagaacggactaatattggtacgctaaaagcactaggctatggtaatggagcaattgccattaagttcttgctctatagcacctcagctgcaattttaggtgttattctgggggctagcttaggttacacctttttgcctaacttaatcatcaaggcctatttagctagctcaaccttaggaactgattaccagctgaattttgcttggggaccactattaatttcattgacgattgcactacttgcaacaaccgtcgtttcaatgattactttagctcaaactctgcgtgaacagccttcagctttacttttacctaaaccacctaaaaatggttcacgtattttactagaatatattccatttttatggaagcacatgagcttttcagctaaggtaacagcccgcaatattttccgttataagagcagaatgctgatgaccatcctaggcgttgctggttgtactggattactagtaatgggatttggtattcgtgattcactacacggaattggcaatattcaatattctgaagtacaaaaaaatgatgtcatcgctttgaaaaaccgccatgttaacacgactgagcgacaaaaattaaacaaaatttttaccagccatgatgttacgcaaactactgctgtacaatatcaacaattgactaaacaccttgatagcactggagcaactgaaaatgtaatgctaattgcgccacaatcaactaaaaactttagcaaatctatcaatttgcaagaacgtcaaagcaagaaaaaacttgttttgtcaaataatggtgtagtcatttcagaaaaattagctactatcttgcacgctcataaaggttcaacaatttccttaaaaaatgaacatgggaaactacttaagttcaaagttagtggaatctgcgaaatgtatctcggtcactatatctttatgagcccagctgaatatgccaaagaaactggcaaaaaatttactactaatgcctatttagtaaccatggccaaacattccccaggaaatatcagccatattagtcaaaaaatgatcaaaacaggcgcaatcgaaacggttgtctcaacttcatcaaatagaaaattgctgagcagtttcactggtagtctaaatgaagtcattctaatcctaattttaatttcagggatgttggccttagtagtcatctataacttaactaatatcaatgtcgctgaaagaattcgcgaattatcgaccatcaaagtgctaggattttacgataatgaaacaacgatgtacatttatcgcgaaacaatcatcttatcggcactaggaattatcgtaggctttggctttggttggtggctacaccactttattatcactagtttgccaccagatgtcgcgatgttcgatccgaatatgtacccgttgaacttcgtcttctctgcgctaattcccgctattatcaccgctattttagcaattgttgtccatcacaagatcaagcgaatcaacatactagatgccttgtcctccattgattaagcgctgttatgctataataatcactatagaaaagggtggaaaaaacatgccaagaaagcactttgaattaaacagtgatgttaataaattaatcgaaaaatatgatgaaattaataatgttgatttcaataagttagttaacaaggccttaagattctaccttgttaatcaaatgaactacaaagatgttcaagacgccctgaataaagctgataacgaagcttctaagtatattgatgaagcaatgcgttccagcatgggtgatattaatcgaaattattagaacataactaatcatggaaaaagccatctgttttgacagcaggtggcttttagtattcattacaagataatttattataaaaacaactaattgataatttctttactcaaaatgcttataccgataatatcgataacctatctttttaccaaaaatcgtctccgaagttttcatccaattagccagcaaaacataaatgcctaaaaagactaaaccgaagattgctaaataaccaaaactaccaacacggcctaagtcgttgaaacgatagccaaataaaatttggtaaacaaagagcaggataatgtaaatctcgtttgaaacaatgatcggcaacaaactccccatcttaacgccatatgtcttattaagcttgtgataactgagccaaattaccagtaagaatgaaatatcagttgaaagaattgcaccatccccattcatgaacatagtcatcggtacttgcaaaattatttttactaagacaccttcaaccatatagatcacagccagtttgttcatgttcaaagctaaaagcagtgttaatgaattcatcaccaaaccagcaaacaaactttgaacaatattttcaaccaaataatacgcacctaaactatcgtgtgagaacaagaccgtataaattggagaagccgcaaaagcaccaagtgcaacaaccggaagcaagacaaataatagtagtctatagttctctaaaagcagctttctaatgctttcttgactatcattagccttatacttaagccctgctaaaagcggcagactagtctcagaaacggctgtcgcaagtgaaataatcaccgtggtaatcttgcttggattagccgagaaaattgtgtacaagtaactaacatagcttttactcatatgactgaagctaatcaggatttgtttaaacaaaagttgatcaactaattgcgtaacagtaatgaacgatcccagcaaaacaaacggaattgaggcataccataagttaagcaaactacgagaaacattattaagtgctctgggctcgctattttcaattaattctcggtaatgtccccactgcttgcgcatatatgcaaaaagatacaggtaactagctatagcaccaacacaggcgccaaacacactgaaataaaccgccgttacgtaatcatgatggaagacttcaataatcaacaaagtagccagcaaaataaacaaaattcgagcaaattgttcccataattgggaaatcccatatggcttcatatcattatttccctgaaaccaacctcgaaccatactcattgatggcagaattactacggctggcactaatactcgaatagaaattgttgcactagccactgaatccactggactatttttggcaatcattggtgccgtcacataaagcaaaataccacacgctattcccatgaccagcataatagcgaagcctaatttggtaatgtacaaactgtctttatatctattttgcgaatttaattgcgatacttcccgggcaataactgaaggaagtcctgccgtcccaattgataaaaacagcgcatacggcgtatatgacgaattgaacagcgcctgtgcgtttaattggttgtggtagcttcccagcataattagccaaggaatcaaataaacaaccccgagaattctagatacaatgctaccaaacgatagccaaaatgaaccggataggatttttttattcaatagaatagcctcaaatctacgttagtttctcattgtgccttcttattatacgtggattttataactttgtgggaaatatgtaccaactagttacccttttttaacaaatttttcggctctaataatacaaatcagttacattatttactatattgttacccagcctttaattttacgttagaccccttgacctaaccttctttaattattatccttaaaatgtttctgttaaaggtcataattagacaaaaataataatgtattaagaatattcatcgggggaattaagttgtcattcaagaaaaagattatcactaaattagcttatgttgctatgctttcaactactggcgttgccgcagctgcaatcgtgcaaccacaagcacatgttcaagcttctaccacttcagttgctgctcgctcactcggaatcgatgttgctagttaccaaagtgctgatctttcagctcacgctaaaagcggtgctaagtttgctgttgttaaagtaagtgaaggtaccagctacagaaatcctaaggctagtgctcaaatcgctagtgcccgcgctaagaatatgatgccaatgggctaccactttgctacattttctgctaatagcgctgctgctaaaaatgaagccaactacgcaatcgcatcagctaaggctgttggtcttggtgctggctcataccttgcatgtgactatgagtcaggtgacggcaacaatatctatggtggtaagaatcctactgctaatgcaattaatgccttcatgagcaaggttaaagctgctggttacaagccacttctttacgctagttcatcagttttaagaaacaacattaacactaactctgttgttaacaaattccctaactcattatgggttgctgcatacgctgtttcaggtcgagtagacaatcctaactttgactacttcccatcaatgaagggtgtttcaatttggcaatttactgacaactggcgtggtcttaacgttgacggtaacattaacgttttacctcttacttcatcaggtagcgctgtttctcaagcacctaagaaggctcgcgtattaaagaagaaggctcatgtatataacaaggctggtcaccgtacaggcaagactattaagaagggcacttctatcactacccatggcaagaagaaaactatcaatggtaagaaatactacaagattgccaagaatcaatacattagatcagctaacctttactaaaaaggcaaaataagtcatcaaaaaatgcaccaggtagaaattacctgatgcattttattttatccaattttttacttggcgaattgttcaccagctaagttacggtagaagttagccttagcttgacggtaatatgggttaacccacaataaaccgatcccgcaggaaataataccaagtagccaccagccgatgaaacttaaatcaaaaataaacaagtccatcttatggccatccatcaacttacggctggcactgatagcttctgtggcagtcggctcatgaccactatctagcatgtcacgcaagatatatggtgtcactgcatatgaataagccttgatcagccctggaataatcagtaaccaagtccacaaaataagaaaaatttcatataaaatataagttaaaaagttactcttaaagtttctggtaaatggactaaagatacctgaaagaacattttccttagtaccactatctctaaaatgcaagatagtataaattacgccccatgtgattaagccaattgcaactgaaactaccaaagtaatcagccatgcaaaaggattaactcttactttatctaggtacatcaattcagcattgttaccgaagcggcggacaataccgtacacgatatcttcgcccttttcaaaaaagttttcgatatcggtcaaaatataaacgattagccagccaacaaatgacagcaaaactgcccagccccagttaccacgtaactggtctctagcttgttcttttaattcttttcttgtagtagccattttctctcctcctcacttttctaatcatgagtattgtcgcctaaaatcagggcagaatcaattaaaagcacatcaaaaaagcctaattccaccaacatcggaactaggctcacacagtgttgaccgccactctgaccacatatagaagataacattttcgctaccggagaaaatgactactaatagcgacggtacatgatagattttagcattcaactacctaaaagacaagcgaaaagacgtgttgaattagcggaatggataccaaaatttacggataaaaaagacgaggtctaaacctcgtcttcttcattactaaaattcaagcatcatcgtcattgcacgattgatcttctttttaatctttttaaactcaccagaagcagtatgattatcctgcaaaatgatcatgttctggccatctttagttgcccgcataaaggtataatacccttcaccagcaccattagcagctttataatgctttaaattataaagtccaccattataatagctaggagcctgacccttgaacagaacttttctactcttgttagtcaaaatcttaccagcaagaatatactgcatggtcttagctaaatctgcgttagacattacgattgaaccagcacccagctcattgtgagcatccttaacggctttagcatggttcactttgacatattcaccctcacgcatttcatagcctggtacccaatgactagccaataacttagccttgtctgaccacaagaactcactatgggttagcttcagtggcttgatatatgtgtcatggaacaattgctcgtatgactttttctcaagcttggacaagattccacaaaggaaaatatagtttactgaagtatagtgccacttacctaatttgctagcatcaaacacagtatattgtgcatcatgcttgatgttcgcttcatcagagataaactcaggcgtacctaattgttgaccagctttcaaatccagccctgatgtcatatcaattaagttgctaatcttgactgaactagcaccatctacatttgggtagaattttgaaagtttatcgctaagcttcaactttcctttctctacctcatgcatcaccattgcagctgtcattgacttttgaactgaattgatcaaatagctagtgtcaggtttattgtccgtcgcataattaagcaaaactttgccatgatttattactaaaactgagcctttaacgcccacatggtcaatagcctggcgcactattccgcttttaaacggtctttattgcttaaatcaactcgtttaacgttatccttgttttgccacttcttggagtagaagtagttagacatatcatagtcataacgcttattaggttccttcatgaatggacgaacagcttgatcaactgcaacccagcctttccagcctaggtgaatagtatcttgcataaagtacttttcattgcctcgtcttgaaagatctgcaatattttcaaagccttgactggttaactggtgttccatcttagcaacagactcttggtacatcttgctagataaaccagtgtacttcatccacttgccattaattggtgggatgataaatagcacattagtgtgttgcttagcaaactgctccaacatcaattggagatcaccatattctactgaatgtacatagtcaaaatcacgctgactacccttcaagcgtttcaataccttctttggtaaacgtgttctaaagaaggtattatcaatacctaagttgtttgagttagtgtgtatagcagcttgctctgctgcaaccttattcaaagcagctacagaatacttgttaggtaaaaccttagctctcttttgaatcttatttacacgatcacgcaattggaatgagctgaagaaattatcttcgttacgcaacattcgacgacgattttgtaaataaaatttttggaagctagtcaacttcttgccttgagcaatttgcttaaggctattcttgatctcgccctttacatttggcatttccaacagacgtttagctgcataacgatcagttttattattcttggcactaagcaagaaattacatgcttgcaatggtgaataatacaatgcaaaggcattaggatcttgaccccgcttagtaaaccattgtggtgaaatgatcacaacagccttcttgtttctaagctgcttagctgttccttgcatccccaagaactgagccaaagattgactacccggtccacctaataagaatggacggtagtttctatgatacttttccgcaattacactagggtgaagtgggtcgaatcttgacaactcacttgaaccatagaatggcacgtagccatcttcaaaagcttcctgcttcattgtgctgcccttgaagacagttgtgttttgtgaagctgcagcctcgtaaatcgtttgcttagaaaaagttctttcccaaggaataaggaaaacaactaacaaaaggataaaagcgcaaagaactgggccaaagatttgccacagccggcgtttattactcattttctaagctttccacctttgccacaatcttgtttggagtgtcccattcttcacggttaaattctgaaacaggaacatcaatatcaaacttttcttgcaagttcaaaagcatttgtacacttgccattgagtccatcaaaccattgtcaaagatgttttcatccatttggtctgataaatcttcaccagttaagtcatttaaaatatctaatacgccttgttttgtatccataattaatacctctcaaaaaacaactcaatacttattctacttccagccgaaccacagttgacttaggaaccctgagaaaatcaagaaactgaaacatactacattgaaggttaagaaaatggcgaaccatttagtaaacttgttagatggaatttgcttcttatgctttctcttgaatctaagccacatatcgttgatacaaatagctgaagcatggaagataccataaacaatataataccacgttaagccatgccagaaacccatgattaagaacaacaggaagtaagaaacttgtgataatctaattcgattcttaaacattttcttcttcattgcaaagaaagtgaatcgcatgtagatgtaatcacggaaccagaatgataaagtaatgtgccaacggttccaaaaatccttaatgttcttagaaataaatggcttgttaaagttcattggtgtatgaattcccataaagtatgagattgatacagcaaacaatgagtaacctgcaaagtcaaagaacaggtacatactgtggcaatacatgtaagctacaagccaccatgatagcttcaagccgccatttgcattaccaacggctaaagcagcagcactgatctttggtaacaaataagtgccaaagaaccaaccaatcacaaatttgtataaaaagccttggaataagtatctaacagcatactgcatatctgtaatgtatgcatcacgcgtaggtaccttatcataatcttttttaaatctgcggtaacgatcaataggacctgacgaaatagttgggaagaaaagcaagaatcttgcgtaagtaacaggatctactttcttaattgccccatcacgcatttccataataacttgtactgtcttaaaggttacgtatgagattcccaagaaaccaatgacaaagccaattgagttatcaggaaaagcggtcaaatatttaactgcggctaatggaataattgccaaaatcacagccaaactaaagatccaagtcttatttttaccgtggtgacgataatactgataagcaaaggttaaggcaaattcgtaaaccaaccagattaataggttaaccccttgctcccagtgatcaccatcaaaaatcaagaacaagaaaacaattgaaaaaattgcttcatatgtcttgagtcgatgaccgtaatatagcccaatgataattggaattaaagcgatcatcaaatagatgaaatattgcggattagaataaggctgtaagttaatgaaattaaaattcactacttattaacctccttaattaccgccttaatatctaccttaccattttgtgaaataggtaatgcatcttggtagatgtaacgctgtggaatcatgtaaggcattatattcttagctaagtcttcacgaatcatcttagttaaagcagcttcagaatactgacgacgaacgccttcttttaattcgatttcggcaacgatctgcttaacagtgtggtccttattgtacttaggagcagcaacgccataacggacaagcttgttcttagttaagtagaaattgatttcttcaagttcgattctgtaaccattgaacttgatttggaagtcaattcgaccgcgataaaatagcatatcgccatcaaagaaaccagcatccccactccggtagctacgatactcagcaccatcttcatggaaaaaggcagcttcggtcttttcaggattgttcatatatcctttagaaacactaggaccactaatgataatttcaccttcgccaggcttatcacccttagaagtatcaattgtaatcttagtgtcttcttttaccttaccgattggcaaacggtcatactttttaagaacttcatcagtaatttcaacttgagtaacagcaactgttgtttcagttggaccataggtgttgaaaatatgactatctgggaacttcttcttaagcatctcagcttcactgtgtggcaattcttcaccacagaacaagaaatgacttaagtctggatggtgttctgcatcaaaagtcttgtccaagaagcacatctgtgcaaatgacggagttgatacccaaacattgaactgcatctttggcaaagtttggaataatttaccaaagttttgagtaacatcatgaggcaaaactaccaacttaccagcagaaacaagtgctggataaagactcattactgacaaatcaaatgagtaaggtgcttgtgccaagaaacttggatgttctggcaaattaaagtctgacaactcccagttaacgaaactaagcaaattgtcgtgactaatttgtacacccttaggtttaccagttgtacctgaagtaaagataatgtagtagttctcatcaccttcaacgaagttcttctcgtcaacttcaaaattgtcgtcttcaacttcgctagccttaagaaccttaacatcagttaaatcaacttctggtaacggatcaatttccaaaactagtggtgacttagaaacgtcttgaatcatcgttaaacgttctgcgttagaatagctagcaattggaatataagcgtgacctgacttaacacaaccaagaaaactagcaatcatttcaaaagtttgtccgccccaaatcataattggagcatgctctggaatatctaagctagcaattttatgtgcccacgcatttgaacgctttttaaggtcaccatatgtattagtttcaccgagatagtcgtaaacaacacgatctggttcgtttgcggcgatctcatcaattttcttaataacatcttgaatcatgtgatagcacctaccttaaaattcattataaatgaagtgaacagatgttagtccactatattcatataaatagataagagccatcaggattccgaaataaacaattgttttcaaaacaaacataccaatacgtctgcctcgagaatcaaccttcgtctttttattcattttttctcctttaggtaatcttacttttgcctttgccctatattactacaaatagtggcaacaaacgcactaacggcttatattttaacaaatttaaactttttcttaaatcttcagttatttgtttcaaattgcgaatgcgttttctttactgttgtctcttgcaatcccgataagcaaaaaataatggaataaagataactattgccacaaaaatcaaagcaaagatcattaagcgccatacattctgtggtttagtccacattttactctttgccgtcgccaacaaaaatgccgcaaataaagcaataacaattacttcaaccaggcaaaaaattaaatgagtattttgccagagatataagtaggttgttgccggaaataaacaaaaccaccctgaaaagcgtaaaagaaagatttcttttttacgataatctactttcattatagtttcctttcctcattaactgccaaataacgcattaatattcaccgacaaaatccggtccataactacaatttctggtctggcgtagatcttagagcctgattcaaacacacatagtagttgtcccttataagcggtaatttgctctaaatatggcggcatggtaattaccagttctgcattcttttcgtctaaagcatttaaagctgaagttggaaaaacgtagagcttggaatcaccactaccataagattggctcaaaaaaattttattttggtaaattgcaattccttgaatttgcttatccattgaagtttcgccagttggatcggaccattgcagcgttccggtaacagatttaacttcattattagtaattgagccacgatttttaccactacgcgctatagtgtaagccgcaacttttcctcgaccatacatgttaaaaaagccaacaaacaattgaccatcataatatgtaacggtcgatgctttttcaactgcaggaatggcaatttgatatttatacttaattggtatttggctgccctctttataggcccttaattctgccattgaaaatgctgctagcgctgaagatttgcccattgagccagttatccagatatttttggctactggatcataagcaatcccacctaggtgtggccgaccaggtatttgaatcgttttaagatatttgcctgtcttcttatctaagacataaacaaccgaagcatgctcatgttcaccatcataagcagttagcaaaatatacttacctgcaaccgtaatcccctgtggtgtcattgcagttgctgtattgacctttttagttttaaaatcataacttttagtagcaactaatcccggcaaaacaaagtcttttccatcccacgtccgcggtggtacataattggcaactttattaataaaaggatatttttcacgcaatgctttttggtaattggcaaaattatgccaagcaggactagtgcttgtcccatccttagcaattttttcttttggccgttgacggatcatctcctgcttctgccaccattggtaaccgaaatagcctcctgcaccaatccctgcaagcaaaagcagtactagcaggaagcgcaaaattcttttaccaatttttttcaaaaaattactcccttctgtttaggaattgtccctattatgcaattcattataacgaaaaaacaattactttttgtttttaactccttgctataagctttatttactaaaaagataaatttttttgcaaaaaagtgctttcgtcacacttttttcacaaattaaggttatactagtaaatgtagtgaggaagaataatcctctactacaactcaacttttttgtttttcattcatactcctccaagtaaataatgaaaataaaaagaattgacttactccaattagtcaatttcatatctatccctttcggctcacgtgcgttgcgtgagcttttcttataccttaacttattctcaagcaaatctttaccttttcataataaattgaacacttttacttcacatttacccagtattatataaaccgtagcaagatggtagaaacttgctacaatactcccacttttttatttcattcttactcctccaaagtagatgaaactaataaggtccgcaaaaacttgcgggccttttcctttttcagcacttttttctgtataattaaggtagaaatgaggtgccgctatgttttcaccatcaatcaaacatttaatagaagaaaaatctggttcatttttaatccctgctagccgaattgcctttgtccaagcagacaatcctctttatcatgcctttttgattttgactaaggttaaatattcaaaaattccagttttagataaagaaaaacgagtcgttggcctgcttagtttggaaatgattacggacaagatgctgacgactgatgagatctccactgcccctttagataaattaaaggtcgaagatgtaatgcaaactaagtttgataaaataaacttcgttgaaaccaccctagaaacgcaactgcatctgttaatcaataatgctttcttgcccgttgttgatgatcgcggcgtgtttcagggactacttactagacgcgaatggattaaggcatttaactatgtagttcacacttatgacaaacactacgaaacaaaacgaataaaataacctccaagcagcctttaaggctgctttttttaactccaacatttattgagcaaaaatgtgtccagaccaataaagaatgttagaattaagcggtagacagatatgtttgtattttggggagggcaattatgaaaaatttaaaacgtcaatggaagtttattgtcgttttgattgctggtgcagttggattaattagccaatttgcattgcattcaaagagcctattctcaatcgggaatcttcaatttccagttcatgccatcattattgatatcattggtatcttgatggcaatttctttactattggaaattttccacgattggaagacaggccgttacggcgtagacatcctggctgttatcgctgttgtttctaccatattgattggtgatgtatgggctgaatggatgattttggtaatgatgaccggtggtgaaacgctggaagattacgcaactggtcaagccaacaaggaattacgtgccttgcttgataaaacgccacgtatcgccaacaagttagttgacgggaagatcaccgaagttaaggttgatgacctgcaggtcggtgatactgttttgatcaagccaggtcaacaagttcctgtcgatggtcaaatcgttaagggcacttcaagcttcgaccaatcttcattaactggtgaatcagttcctgtgaccaagaaccctggcgacgaattaatgtccggttcagtgaacggtgatgtagcggtagagatgaaggtaactaaggctgctaaggactcagaatatcagtctattgttgcgttagttaagtcttcacaagctcaacctgctaagttcgttaagatggctgaccgttacgccattccgtttaccgttatatctttaattattggtggtgtcgcttgggctgtgtctggggatgcaactcgctttgcggaagttatggttgttgcttctccatgtccactgttgatcgctgctcctgttgctttggtatcagggatgagttcaatgtcagctcaccatattattgttaagtctggtccaaccctagagaagttggctcgcgctaagacctttgcttttgataagactggtactttgactgaaaaccaattgatcgttgaccaagtcgttactgatgacaaatcatttgatcaaaaagaattgcaaagcttagctgccagtgttgaacaacagtcaagtcacgttatcgctagttctctagttaaggctactgacaaggatttaattcatcccgtaactaaccttaaggaaactaccgctcaaggtgttgaaggtgatgttgatggcaaacacgttaaagttggtaagttatcctttgttgcgccaggtcatgaaaaattaaacgtcacttcaactgctgtttacgtttcagttgacggtaagtttgctggttacatcactttgaaagataagatgcgtccagagagtcctaagactattgaacgtcttcgtcgtcaaggtgcagaagatatcatgatgcttaccggtgaccacaagcaagtcgcagaaaaggttgccaaagaagccggcattactgatgtccgctcagaacttttgccatcacaaaagattcaagctattaaagatgtgccaaagcacctacgtcctgtcgttataactggtgatggtgttaacgatgcacctagtctgaccgctgctgatgttggtattgctatgggtgctaagggtgctactgctgccagtgaaagtgccgatgctgttatcatggttaacgatatttctaaagttaacgatgcagtcgctatttctaaacacacaatgaaggttgctaatatcgatgttttaactgcaattggtgtcgttattatcattgaattgattgccttcactggtgttatcccagccttctggggcgctattttgcaagaagtagtcgacatgattacgatcagcttaggtttacttgctaagactaagccaagtgataagcaatttggtttggaagaaaaatagattagatgtgaagaagctccagaatcgatttggttctggagccttttttcatacataattatgcgtagcactgcaccagttcaatttgcatctaagttaaaaaactattaagattaaactcaactaaataatttttagtggttgggtttttatcacaataaaaactttcaagattcgcttctttgggtcaggaagcacttgaaagttttttgtttttttacagaaggggaaaatatgcattttttaggacaacttatcttaatcctcttaactacagttttgctggggcaattattcgcccgcttcaatatgcctgcagttattggacaactattatcaggaattttactgggaccagctatcttaaattgggttaagccaaatgatatcatcagtctattctccgagttcggggttattctgctgatgttcttagctgggcttgagagcgatctagatttattaaaaaaatacttcaagctaagctttactgtcgccacagtcggcgttatcctacccgttgttttcatgggcttagccagttacttctttggcatgcgccctcttgaagcactctttatcgggattgtctttgcagcaactagcgtttctatctccgttgtggtgctgcaagaagcacaccaactgcacacccgtgccggcacagccattttaggtgctgccgtagttgacgatatcttagccgtggttgttctgagtctattcactacattcagtcatgaaggtggcaagagcggcttaactaataactttttgcttaatatcttgattgaagtagtttacttcgtagttgtttggctgatttttaaatttgttgcgccatactttatgaaagcttctgaaaaaatcgacgttgactattccgtcgttatcggttcattggttttagccttaaccatggcttgggccgctgattttgttggtctttcagctgttgttggtgcatttttcggtggtttagcaattcgtcaaacaccacaatacaaagaagttcactcctctgtttccgcaatcggctactctgtcttcatccccgtcttcttcgctgatatcggtctttcaatgacttttgccagctttttcaaggatatctggttcattatcgttatgaccgttttagctattttatcaaaattctgggccggaaaatactccagcgaaatctttggcttcaataagaatgaaggcaatatcgtcggtgctggaatggtatcacgtggtgaagttgcactgattgtagcgcaaatcggaattaaccaccatctcttccctgaggatatttattcaagtctgatcctagtaattatcgttacaacagttatttcaccatttattttgaattactttattaaaaagagtcaaaatagtacggaatttatgtagaaaaagtctagcattcgctagattttttaatagtttaattttacaagtggcttatcataaacgcaattgtgtctacatggtaaaatcaatagtgagaggtgagaaatatgttacaaactccaaacaatattagagctgttaccgctcgtgacctgcgcaataattttaagaaaattgctgatgatattaatgactatgatactaccgttatagtagctcgtcccaaagataaaaatgttgtgattatttctcaaaaagaatatgattcatggcaagaaacttcatatcttctaggaactaaagctaaccgcgatgcattagctgaagctaaacaatcatttgaaaaccaagatcaacgaaataaagttttaaccccagaagaattcgaggctttaactaaagatgacgaagcttaaccttaattttaactacaatgcctggaatgaatatcttgaatggaaaaaagaggataagaagacttcccaaaagattgataattttattaaagaatgccaacgccatccttttactggaaaagggaaacctgagccattaaaagcgaatttaagtggtgcatggtctcgacaaagtaatcataaagatcgcatggtttattcagttaccacaacagaattacaaatatggcagttaaaataccattattccaaatgaaaaagctctttcgagcttttttgtttaacccaattttcctaaatcgattacttggtcatacttctgcaactcatttgattcatagtggtgaattacttcaataaaggtaaggtttgagtttaacaagtaattatgaatttgatctgatgtcttcttatcaagggatgcattaatttcatctagtagcaaaatcgatctatcggccaaaattgcccgtgctagttctattctagctagctgtcccccagacaattgatccgcattatcacccaaggaatagtcccagcccttttcagcaataatttgatccaaacctaatttttggcacacctcgctcaccttttcccgggaaatatttgcacctaaagttaaattaaaccacaaggtatcggcaaaaattactggggactggctagcataagcgaataaatctgtaaacgagcctggcttttgctttttgtcgttaagcaatatttccttggcatgaccatgctttccggttaataggaattgtaataacgttgatttacctacaccagatggtccaataactgcaactttttgaccttttacaactgcaaagttaatttgattagctaattccttgccttttctagtaagatccagatcttctatttgcaaatttgcaaaattataattggtctctttcttttcaaccttgcccttggcaatatatttttctgccttagcgacaattttcttagttgttgataatttgtttcgatcttctaaaatagtcaaaattggattaagaaatgaatttgacagttgaacgattgcaaataaggcacctaaagtagtttgacccttaaccaccatgtaaattcccactaagaatggggttaagaacgtaaataaactagcaatcaagttaatccaagaattagtatctagattgagtaagttcattttacgcaaagcatcttctaattgattgatcaaaacttgatttttcttaaccgcattatcgcgcttgttgtataaatttaatgttgtgctaccagccagaaagtttttaatatgactaacatatttatcattagcagttgtccaattttctgctgcagtttgaatcttcttttgaaataaattagaaaccagcatcggcaaacatgaaccgattaaaaataataatgtaactaaccaattaacacataaagcataccctagcgcaaaaacaatcatataggcctgcatcattatttcaatttcagcatcaaaacgattagtttccagcagcttaaaatctgtagtcaaaaagcctaagctagcagtattttcttcgctagtctgacccagcatcccctttaaaatgccagctcgcagcgtcgtattagtctcttgaatagcacttgtttttaaccgattgaaaatcagcgaagcaataaaagtcgcaataaacgccccaataacaataactagaaattgtgctaaatcgccaaaccttctttgcgtaccaacattggtcaatgtctgtaccatatatgcaaaaatgatttgttgtgtactagcaatcaagcctaaaatagttaacataatgaattttgcatgtgaagaatatttgtaaatcattttttgtcctcctgtattttacttgaggctagtatcgcaggataatgacgaaaaatgttagaaatttacagatctgcaaatcgaggtaaaacattatgttcaaatatggttcaatttacaaacaattgcgcaaagatcaagaaatcactcaaactgaagcctgcaagggtatttgttcaatctctaagttatcacgctgggaaaataatcaggtagaagttgagtttagcaccgccattgcattactcaggcgcatcaacattacgcttgacgaattcacgcattacgctgcaatgaaaacagaatttacattgccagacgacattataacggccattaaagacaatgatacaaaggtactcgaaaaatttgttcaggagcagctaaatcattatcacgccaacaaaaatattctcgaactcaaaaacatcattcttgtctgcaatcaattatttctcatgactggtaaaaactatctaacacctgcagacattaatcgaatcggttcatacctgcttcacaacaccgtttggtctaaatacaatatcttgctttttgctaactcaccgtttttgctaaattctaaaatcggctatcaaattgctctgcgaattattcacaattttcaccctacagaaagtttaaacgaaaatactactattttcatgggcggtttatctgatacagttattgccttagttttcaaaaagaagctagattacgctcaaaaaattcttaatgaattaaaaaagataggacttcccttctatctcatgttctttagttcaacattgacccttttacaaaaaattatcgactactgccacactctcaacgcacagcctgtattggcaatgattgatgccatagttcagctaaattgcatggaagttgctaaaaaatggcttgagatttttaaagacgtacaacaaatctggccagaaaaagaaaattaaaaaccgtaaaagtaatttactttcacggcttttgacatggtattcattatgcaagcttacaaatttttagcttttaattaatccttaacaacgtctttggtgttcaaccattgactcttgttgatcttaacgatcttcttgccagcagctttcttaacatccttagcggtgtaagttgaacccattgaaaccttttggctagtcttgtgaccttgtgcgtccaaaacattaactttttggttcttagtgtcctttacagcaacaaagatcttgtcaccctttttaattgcaggatcagttggcatagtttcggcaacacctaactttggagcagtaaaactagctgcttgactaactgaagcaccaacacccattaaactcattgaagcaactgcgattgaaacaactttaactaaattctttgaaactaacataatgaatacctctaatttctatatcacttaatttgttggaactttttgttccctcattccttacgtctttattgtataacatatgttattaattacaaggggtttatcgaattttttaaaaataattcagtcgtctcaaagtattgctataataacgattgcggggattttttgtccaaaagcattaaaaaagtgtctgagaaaccgttctttcccaaacacttttttaagcagctgctacttcgtttgaattttgagtcacttttctagtttttaaactgacaaaaatcgctacaattagtgttattacctggattactaataatgtaaccaaagcaacagtaacattgaatgaaccagaaattgtggttaatactgttgtcataattggagcaacagccattaagattgtatttaataagccaacagttgaagccaagattttatgatcaactgatgttactagccattgctccattttaactgaagcaactcctgcaatagctgccaagaaaaacattgttatcataattacgtaagtatttcctaggaaaatgcttgttgtagtaacaatacttaaactggcagaaataattactaaactaaaaactgttaattttttgaataattgtggtccaaacattgaacccaatgcaaagcctgcgccaataaccacaccaaacaaagcaatagtaaagctataagtgccgattagcatagttgaacgatgagctgcaagtacaattgttgtcaatggagtaattgtatctaaagctccatttaataatgcgattactaataccacagtcaataatcctgattgtttcttcacttgggtcaatgaagttttcattgtttggaaaaagttttgatcattaacttcctttttttcaagtggcttctgatccttctgatgttttaagccaacactggcaaataacaaacctgctaacaagaaagtacctgcattaacaaaggctaaagttgagtatgacattactagcaaaagtgctgaaccaatgaattgagcacccatactaataatttgatttacgccgccattaaagcctactgcattcccgtattcttttttaccaacaatatcaacaattaatggtgcaaccaagccacctgaatatgaaccaatagtatctgataagaaattcacaacaacgatgattaaaaccaaattccactgtgacattttagtgataaacaataatcctactaaaccatataagataaatcggacaaatgctgctaaaaagatattgcgaaactttttcttagtcttatcagcaaggtaaccaccaaagatctcgaataattttggaactgattcagaaattgcaattaatgaaagtgctaatgagtagttttgtaatttgctagcataagtcatgaaagccaagtagaaaagaatatcgcctgcgcctgaaagaaaactagctactgaaaatcttctaaagtctgcgtttttaagaaatacgttcataaatcttaccccctttttctttgtttcgtttgttgttgaaattataataaagtgaaaaagaaattaattttaaaaatggcgtattcgacattcggaggataaacctatgacaattggtgaattactcaaagaaaaaagactagcagaaaacaaaactcaaaaagcatgggttggtcatattatcagtacttcttattatgctaaagttgaaaagaatattcatagaattacagcagaggatttattagccattcttaaacataatgatctttcaattactgactttttcgaagaattagcagacaaaaaggatgaactaaaagcacaagtaaactcgctaaataaaacagtaattgatgctgtttatcattctgatgtttccaaagttaatgaagtcattcaaattattaaaaaaatggatctaccgactaagcaaaaacaagaacttatcttaatcaataaggggtttatcgaaactatcaaaaatgatctaagtgacaattatcagccagataaaaacatcgttcaacaactaaaagacaaaatttttagtattcctaattttaatagattcaaacttgaactctatactaatttcatgcaattttatgattatacaactaatattatgatcaccaaacaagtgatccataaaatagatcagtttaagagcgataaagagttattagcaatcgctggtattctattcaatctcctttcacaattagtcgaagaacatcattatcaagaaactgcaccatttatagcagctagtgagcatttaccctttttaccagacttatactttcctcaaaccggaatctcattgctaaaataccttattagttatcattttaataaaaaaacagcagacttagctaaagctgagatgattgcacaaacttatcaaattactggtctagaagactttggtaaaggtgcacaagaaattattaatgaagttaaagaggactagctttaagctaatcctcttgtttcaatctctaaataaaacctaacgcgttatagcacatgtgcaccaaaattgaatagcgcaaatctttggttgacatatagacccaagctaaaaccatgcctaagacccaatatactaagatatacttacttaatgccggatcatgcatatagccaaataaaaatccgcttgcaacaatacctagccacttatttctagtatttttcttagtgaaaaagatattgaaaaacatccctctaaagatatgttcctcacaaaatggcgcgatgaaaactactaggatcctaaataaacctgcattgtattccgctattttattcaagctttcctggttctttgaaacgccgccaccaactagattaagcatcacaatcgaacctactacaatcagtacaaaaccgatcatcgctattccgattctgcgccagtcccagtgtggtgtttcatcaaagccccaatcattttcttcttttaattgcctgcgataaatataggaaattgcaaacaaaactattaccgtagcaagcgccgtaacgaagacgcgatattgcgccaaatcaaatcgctgaggtctaaagtaaagtacttctaattcagaataaattaccaaagccaacacagcccctgcaatatttcccaggtaatgtccaaatctcttcatttttcattcacaccttgattctttcaactagtaatcattgtttctattataatgtaaataagaaaaaatacctaaggaggagtatctatctatgcttaatcagatcatcgcttttttggggagacgcggtgagttcttctacatttcagtctttatgttactgatattttttgcctttttaatctcttggcttatcgaaccaagacgtttgattaatggcgttttgtttactatctttatagtctcaatgctctcttggatcaccgttatggtgcacaaaagtacgagtcacggcttgcaacgtgcctatgacctactagttctagctgcattatttggcattgtcttattattaattttcgcctggatttttctattctggaatgcctatttcgtttggaaatatgaaagccatactttgcctaacttgcttactttaattaccggatttttagcattaattattagtattatcgtgctcttaggaccaggtaagtacttgccacgttggcttagtctcgcattagcttcaattcccgcgattgcaatttatttgggattggtgctttacaactttttggtaaacttgcttctatatcaaatttatcctcgtacctaccaccaagactatttaatcgttctagggtctgggctaatcaatggcgaccaagtatcaaaactgcttgcggctagaattaatcgggcaattcaatactctaaccgccagtatcaaaagggccgcaagcgccctatcctgatcatgtcaggtggtcaaggcgctgacgaaaaaatctctgaagcactcgctatgtctcgttttgcacaacggcgtggcgttagtgttgaccgtatcttattagaagatcaatcgaaaaacacatacgaaaacatgctcttttctaagcgtattgccacaaaagattttggtaattcccacttcagggcacgcttctttagcaataattaccatatttttagagctgctctcttggctaaggaagttggtttaaaagccaatggtgtcggtgcttacaccagattctactacttgcctaacgcaattatccgcgaatttgccggtgtgtttgtcatgcataaacgccgtcatttcgttatcatgggattaatcgttttattctttatcctgcaagctatcttagtcatgacaggattagaaagatttactgtaatttagaaaagagggatgcaatgcttcaactaaagcatatttttaagtcatataaggtgggggacaacatcacccacgctttagacgacgttacaatctcgttccgtgaccaggaattcgtcgctatcttaggtcctagtggttctggaaaaactaccatgttaaacgtaattggcggacttgaccgttacgaccaaggtgacttgatcatcaacggcaaatctaccaagaattttaaagagaccgactgggatgcttaccgcaacaataccgttggttttgtttttcaaaattataatctaatcccccacttgtcgatcatcgccaatgtggaactagggatgaatttgtctggtgtgcctaaaaaacagcgccatgaaaaagcaattgcggcgttaacagaagtgggattgaaagaccatctaaataaacgtcctaaccagttgtctggcggtcagatgcaacgagtagcgattgctcgagcaattgccaacgaccctgatattctactttgtgatgaaccaactggtgcacttgatactgagacttctgtccaaattatgaagttgatcaaaaaactatctaaagatcgactcgttattatggtgacccacaatcctgaattagctaaagaatacgccacaagaatcgttaatttccaagacggtaagattcgtcatgattctgatccttttagccctaataaggaagaagacaaatttaacctcaagcgtaccaagatgtcttactggaacgccatcaagttgagtttcaccaatattatgacaaaaaaaggtcgaactctgctaactgcttttgcttcaagcatcgggattatctcaattgccgtagttttagctatctctaatggttttcaaaagcaaatcaataccacaatgagcaaagctttagcaaaatatccgatttctatttcacagaccgcaactgacattacttcagctaatgcacgtaaagaatcggataaaaatgtcaaaaaccgcggctatgtaacggcagaacaagaccaaagcgaacaggcccaacacgttaataaaattagcacaaagtatgttaactacatcaagaagatcaatcctaattatgccaataacgtgtcttaccaacgcggcgtaagcttgaatttattagctaaaaacaagggaaaaattgaacgcgtgcaattttcaaatacggatcctgatcagactaattctgttctagctgctagatcccaagcgatgagttcaatgggactgggttcaagtgtctttcccactactttaaataaagagaaagactcatttttgaagcaaaactatcaattgctctcaggcacttggcctactaaggcaaccgacttggttttagttactgacaataaaaatactgttaacatcaatgccttaaaaaatcttggtttcgatttaaagaataaggaacacgtcaaattcggccaattagtaaataagcaatttcgtgtagttgctaacaatgattactatcagcaattgccaactggcatgtttattcctaaaaaggtaaataacgccatgtataacggtgctcaaaccaagctaaagattgctggtgtcattcgtcctaaaaacgaagattcaatggccttgttatcaactggaattgcttatagcgatcaactttcacaacgcgtgattaatgaaaataaaaactctgcaattgtaaaggcacaaaagaagagtaaccatagcgtattaactaaccaaaaactaaatgccaatgaaaagaaagctacaatgcagactcttggcggtaccagcatccctactggtatcatgatttatcccaacaattttgatgataaagataaagtacttgattatcttgacaaatggaacaaggggaagaaaaaatcagacaagattctctatactgacatgtcaaacgctgttaccacaatgactggcggcctcttaagcgggataacgaccatccttgtcgcatttgctggtatttcattaatcacatctatgattatgattggtattttaacttatacctcagtacttgagcgaactaaagaaatcggggtactcaaggcattaggtgcccgtaaaaaagacattactcgtgtctttgatgccgaaaccttcatcctaggtgttttctctggtgtattaggcattctgattgcttacctactaacattcccaattaacagtatcatttacaagattactgatctggcaaatgtagcccaactagatcctactgctgctattgttttgatcattatttcaactatcctcaccctcttaggtggtcatattccagcacgaatggctgcaaagaaagatgctgcaattgcattgcggagtgaatgaatttaataaagaatttgttacgttgttcacaataacctaaatttttagcaaaatatgtggtatcttagctttagcaaaaacaagtaagaaaggaacttttttcaccatgactgttaaaaaattagaaaataacagcgatgttaatgtagtggcagaagaaagcaaagttttaactgatttattgaatgaatcaactaagcaagtaatcggtcaagcagctttcgataagatccaaaacttaattaaaatctctgccgccaaagattatcaagaacttgaaaagcaaattgctagtcttaacaatcgcgaaatgattgttgttgcacgttattttgctactctcccactcttgatcaacatttcagaggatgtagaactagcaagtaaagttaatgtgcttaacaatactcatcaagattatctaggtaaattgagtgacacaattgacattgtagcccaaaagaaaaatgccgaagaaatccttgaacatgtaaatgtagtacccgttttaactgcccatcctactcaggtacaaagaaaaaccattttggaattaaccgatcaaattcatcaacttttgcgcaattatcgtgatgtgaagaatggcacaattgatcgcgatgaatggactgaacaaatgcgggcttgcattgaaattttgatgcaaactgacattattcgtggtcacaaattaaaggtagctaatgaaattaccaatgttttggcttactaccctaaggctttaatccctgcaatcaccaaatttactagtcgttacaaggaattagctaaaaaacacgggctaaacgctagtcatgctacgccaattaccatgggaatgtggatcggcggcgaccgtgacggtaacccttatgtaacggctgatacgctagaactaagcgctactttgcaaagccaagtaatctttgaatattacattaagcaaatcaataagctttatagagccatttccatgtctacttcttatatggagccatctgacgatgtaatgcacctatctgagctttctaatgatgattcaccattcagaactaacgagccatatagacgggcattctactatattcaaagccgtttagtgcacactgaacaaaaattactgaatattactaacaagaacactttcttaaagaaacgtgacctccaaaatcttgataaaatcccttgttatcaaaatgctcaagaatttaaagccgacttagaaatcatcaaaaattcacttgaagaagaccatgatcacgccgtagtagacagctactttactcaaattcttgaggctatcaacatcttcggcttccatctagctacaattgatatgcgtcaagattctagcgttaacgaggcctgtgtcgctgagctacttaagagtgctggaatttgtgacaattatagcgatttaagcgaagacaaaaagatcaagcttttactcaacgaattgaacaatgatccacgtaacttacacgccaataacaaacccaagtctgagttactacaaaaagaattaaagatctacaagactgctcgtcaattgaaagaccgtttgggtgaagacgtcatcaagcaacatattatttctcacactgagagtgtttcagacatgctagaacaagcaatcatgttaaaggaatacgatttacttgataatcaaaaagcccgaattcaagtggtaccactatttgaaacggttgaagacttgaataatgcccgggaaataattaaggaattcttaagctttgatatcgtcaagaagtggcttgtttctcaaaataattatcaagaagttatgttaggctactcagattccaataaggacggtggctacttagcttcatgctggaacctttataaagctcaaaaggatctaactaagattggtgaagaaatgggtatcaagattacctttatgcatggccgtggcggtaccgttggtcgtggtggtagtccatcatacgaagcaattacagcacagccattcaagtcaattaacgatcggatgcggatgaccgagcaaggtgaaattatccaaaacaagtatggtaataaagacaccgcctactacaacctagaaatgttagcttcagcaacaatcgatcgaatggcttctaagcaaattgttagcgaagatcatgtcgcagatttccgttcttcaatggatcaaatcgtagctaaaagcaacgaagtttaccggaaactagtatttgagaatcctaacttccttaagtacttcttccaagcaactccaatcaaagaaatctctggtcttaacgtaggttcacgtccagcttcaagaaagaaactcactgacttttctggcttaagagccatcccttgggttttctcttggtcacaaagccgtgtaatgttccctggttggtatggcgtaggttctggtttcaagtcatttatcgatgctgatccagccaacttgaaggaattacaaaatatgtaccaaggttggccattcttccactccctgctttccaatgttgatatggttttatctaaatcaaatatgagaattgccaagcagtatgcggatctttgcgaagatgaacaagttaaatcagtctttgatatcatcaatcaagaatgggaactaactaagaaagtcatcctacaaattgaaggtcatgatgaattaatcgaagatgcacctactcttaagaagagtctggaatacagaatgccttacttcaacattttgaactacatccaattagaaatgatcaagcgtgatcgtgaagatgtgattcaaggtgtttaccaaagtattattccaattactatcaacggtgtggcttccggtttacgtaattcaggataaaaaacacataaaattcagctaaaaaaggctcctcattgcctgttttatcaagcatttgaggagctttttttttaatttattaaactttttagttacgcctttttcataactaagttaagtggcgttacaattactggaacgacaatggctgtaaaaattgcttctactaaaccgttcatgcccagtgccataattaaaattaaaatcaatggcgtacctgaactataatttcctaggtaatgagttaagcttgctggatcatgcatgaagaaaatactcgtcagcaaaataaccatcacggtattagttaacgaagtgactgctccacttatgatataacccaatttcgcatatttagtcttactcatacccttcgcaataattcccgggaaatagccagccaaaatacttggtaccaatgaaattaccggattttggaacaacattaagctgaccatatcgccaggttgagtatatgcaacaatcaatctggtaataccccagaataagccaaagcctagacccgccttttgtcccattaacgtgccatagacggcaattgtcattggaatagtagttacagctggcaaagccgggataattcttacatagccaacatttggcacaaaagtctgtacaatcaataaagcagcaaagacagcagtaattgctaatcttttagtttcttctcttctcatatatttctccaacttaattctttagactcaattaaaccataattaagattttttctcagcaaaaaagtttattatacaatatctaggtatattttatctaatatgacaagatattgtattttttattatttttttacttaattatgcattatccttactctctctaatgcataatcgtgttctataccaattaagaatccctttatatcaatactttatgttgtatgtcaattttgacatagccactaaatattgttaatctcgttttgtgttaaaaatcatttgatggagagaggatcaattttatgaataaaaaagtcaaaaaattactatctattggtgtgcttgcattgagtttaggtgcaattttaaccgcctgctctggtaaaaaacagggtgcaagcaataataaatcaagcgatgccaagcactctattgcattaattactggcggtaatggtgtaaatgataactcttttaaccaatctgcttgggaaggatttcaaagttatggcaaagagcacaacttgagccgcggtcgaaacggttatcaatattttcaatcaagtagtgctgctgatttcactcctaattttgatcaggcagctaaagctggttatcaaactatctttggcgttggttacagtttaaaagatgccgtagcttctgccgccaaacgctatcctaaaaagaattttgccattattgacgatgtaatcaagggacaaaagaatgttgtctcagctaatttcaagagcgaacaagcttcctacttggctggtgtcgtagctgctaaagaaaccaaaaccaacacggttggcttcatcggcggtgctcatggcgatattgtcgacctttttgatgccggatttactcaaggtgttaaagatcaagccaaaaaaatgcacaaaaaagttactatcttaaaccaatatattggcaactttactagttcagacaaggccaaatcaattgctcaatcaatgtacaccaaaaaagccgacatcatcttccatgctgctggtggtgctggtgatggtcttttccaagaagctaaagccattaatcaaactagaccagctaaagataaagtgtgggtaatcggagttgatgtcgatcaatctcatctcggtaactacactgctaaaggtgggcaaaaatctaattttgttttgacatcagtaataactggagtaaatgttgctgtcaaagatatcgccaatagagcttataataataaattccctggtggcaagaatttggtttatggacttaaaaacaatggtgtttctattgaacgaggacagatttcagcttcaacttggaaagatgcccaaattgctagagctaatatcctaaaaggcaaaattaaggttgccattcatcctaacaataaataaaagcatactagtatagtttgctttttataattacaatcaattattttttgcctgatcaatatttttgttgacaaaataccgagcaattaataaacttatttataaattgttcggtattaatattgtggaggacagaaataatgaacgtaaagttcaagaaaattttatcatttggtgtcgttttagcatcagttggcttgattctaactgcttgttcgggtaaaaagtctggtcaatcagccaacaaagatactaaacatggcattgccctaatcacagatgaaaatggtgttgatgatcattcatttaaccaagctgcatggtcaggatttaaagcatacggcaaggaacatggtttaaaacaaggaaaaggtggttatcaatacttccagtctagcagtgccgcagacttcactcctaactttgatcaagccgctacagccggctaccaaaccattttcggtgttggctatcaattagccgacgcagtcaagcaagcagccaagaagaatcctaaaaagaatttcgttatcattgatagcgttgactctgggattaagaacgtcgcttctgcaacctttgaaagcaatcaagcttcttatcttggcggattggccgcagcttacaccactaaaaccaacaaagtaggtttcattggcggtgctaagtcatctattattgatttattcgaagccggttttaagcaaggtgttgctgacggtgctaaagctcttcacaagaagatttcagttcaaacccaatacatcggtaacttcacttcaaccgataaggctaaatcaatcgctcaatcaatgtatgctaaccgcgctgatattatttaccaagcagccggtaacgcaggtaacggtgttttccaagaaggaaaagattacaaccaagcccgtccagcagctaaaaaggtttgggtaatcggagttgacgttgaccaatctaacctaggtaactacaagtcaaaagatggtaagaaagagaacttcactttaacttccgtcttaaagggcttagatgttgctactaagtcaattgctaatgatgcttacaatggtaaattccctggtggtaagcacttagtttacagcttaaagggtaatggggtttaaatcaccaaaggtaatttaaacgctaaaacttgggcagcagtacaaaaggctcgtcaacaaattattgatggcaagatcaaggttgctactgctccaactaagtaattcagctgcttagtattttgagaactcttcgttttttagcgaagagtttttctatagttaattaaggaagtatttatttacatgaaagaacagagaaataaagtaatcgagatgcgtcatattgtcaaagatttcgatggtttcaaggcaaatgacgatattaaccttacgctctatcaaggtgaaattttggctttgcttggtgaaaatggcgcgggtaaatctaccttaatgagaattttatccggcttgcttgaaccaacaagcggtgaaattctggttaataatcaaaaagtaaatattaaagatccaaccgtcgctaaaaagttaggcattgggatggtacaccagcacttcatgcttatggactcatttaccgttttagaaaatattattctaggacatgaatcaactaaaggaccagttatcgatctgaaaaaggcaagaaaacaggtcctagctcttgcacaaaaatatggctttgctattaatccagatgccaaaatctctagcattactgtcgcccaacagcaaagagttgaaattctaaaggtactttatcgtggtgcagatattttaatttttgatgaaccaactgctgttttaaccccacaagaaatttctgaatttattaaagtactcaaaaatttagctaaagaaggcaaatcaatcattttgatcactcataaattagaagaaatcaaggctgttgcagatcgagttacagttatcagacgtggtcacgatgttggtacttttgctgttgatcaagttagtgatgagcggttagccgaattaatggtggggcggcatgtcaacatgaagctaaccaaaccagcacctaacttgggcaagcaaattctagcaatcaaaaacttacaggtaaaaggaaatcacggtgccttaagcgttaaagacctttccctttcaatccgtggaggcgaaattttagggctagccggaattgacggcaatggacaagatgaactggttgaagcaatcactggtttacgccatgttaagtcggggcaaatcttaattgatagtcaaaatttaaccaaccaaaaagttcgcaaaatcaccgaagctggcgtagcgtatattcctgcagaccggcaaaaatatggtttaattcttcacatgtcattagctgacaacttagcgctgcaaacttactaccaacgtcccttctctaatcatggcatcattaatcatcaagcaattttgaagcatgccgtagatttaattaaaaaattcgatattcgaactactagccctgcattgccagctagcgacttatcgggaggtaaccagcaaaaagcaattatcgctagagaattaaatagaaacagcgatctaatcattgcattccagcccactcgcggtttagatgttggtgcaattgagtatattcataagcagcttttagctcaaagagcagcaggaaaagctatcctattaatttcatatgaacttgatgaaattatgcaattatctgaccggattgctgttttgcatgatggtcaaatttcaggcgaagtattacctgaaaaaactacagatcaagaactaggtcttttaatgaccggtgttaagaaagaagatgcaacaattgattaaagttacacctaaagtcaaaaatattctagtaccagttatctcagtaattgctggttttatagttggtgcaattatcatgctgatttggagttataatccttttcaagcatacagctccatgttctctagcgcactgggcaatatgaatggtattggtgaaactattcgtgaagctacgccattaatttttattgctatcggttttgcaattgcctcaaaagctggcttttttaacatcggtttgccaggtcaagcacaagctggttggttgacttctatttggattgtattggccaatcctcaattgcctaagccagtattattgcctttagctattattgcaggcgctatagctggtgctattgtggcaggaattgctggctatttaagagctcaatttggaactaatgaagtaattactactatcatgcttaactatattgtgctctatacttgtcaatatttaatgcaacaagtaatgtcctcaaaattaagaattgataccgatactaccaaaacaattccagccaatggcagcttaaagcttaactggttaactagcatgtttggtgattcgcgaatcaatgctggtattttcttagcaataattggacttattttttattggtatttaatgaaaaaaactaccgttggttttgaaatcaaggcagttggactcaatccttttgctagtcgctatgccgggatgtcttctaaaaagaatattattatttcaatgttactttcaggtgcattttctggcttaggcggtgtagtacaaggacttggtacctaccaaaactacttcactcaaacaactagtttggatattggctgggacgggctttcagttgccttacttggtggtggaactgcaattggtattttattagcttcacttcttttctcaattttaaaaattggtggtttgggcatgcaaactattgccggtattccttatgaaatcgtatctatcgtaattgctgccatcattttcttcatcgctatcaattatgtcattggtttgctttttaaaactaagaagaaccgcagtgattactacattccaaccagaaaagaaaaaggacccaacaatggtgttgatggtccaggtagaaaagtaatcgaaggagaaaaataatgaatttcgttacaatgatggcgttaattgtttcatccactttagtttattctgcgcctctaatcctagcttctcttggtggtgtttacagtgaaaactctgggattgttaatattggcctggagggtatcatgaccatgggagcctttgcggcgattgtcttcaacctaactttcgcttcaacttttggtgcagctgctccttggcttggcactctagtcggcggaattgttggtttgattttttcattgcttcacgctgttgccacaatcaattttcacgctgatcatgtcatttccggaacagtgctgaacatcatggcaccacctttgggtgttttcttgatcaaggcaatttatgataaaggccaaactgaaaatatcaccgctaactttggctacttcagctttcctggtttaagcagcattcccatcgttgggccaatcttcttcaaaaacacctctgcccctgcttggattgccattattcttgctattttgatgtggtggattttatataagactcgctttggcctacgcttacgttcatgtggtgaaaatcctcaagcagctgacacaatgggaatcaatgtctatggcatgcgttatgcaggtgtattaatttccggctttatggcaggtcttggcggtgccgtctttgctcaagcaatatctggtaacttctctgtttctactatcgttggacaaggattcatggctttagctgccgttatatttggtaaatggaatccaatcggtgcaatgctctcatcccttttctttggttttgctcaaagcttaagtattattgggcatcaactgccaggaatcgatcaaattccatccgtttacatgcagattgcaccttacgttattacaatcatcgttttggtcctcttcctcggcaagtcagttgcacctgccgcagatggggttaactacatcaaatcgaaataaggaaaaaaggttgtttcacatgaaacagccttttattttacacatgtccacatagttatccacaagatatagcacttatatgtggtagtcttactatatcttgtactaaataacagctatcggcgttttctcagttggcattggaaaatcactgttaagcaatctaagctcatcatctgtaagtttaattttttgtgttgcaatattttccttcatgtgttctacactacttgccttaggaatcgttaaaacattgccattgcgcatcgtccaagctagcattatctgatgaggcgtaacgccatgatcacgtgcaacaattttcaaattacgcgtaattcgaattgtgttgcccttgcctgaattaaatggtgaatacccaataaagtttacaccgtgctcttcttgccaagcttgcagatcaaattctgtcccacgttcactgatattgtataagtcttcattagcaaagcattcttctccacctggcactgtaaaaagctcctgcatatcagccgtatcaaagttagatacaccccaataacggatcaagccatctttttgtaatgcttgtaagccgtggatcgtatcagacaagcgatgactgccccgccagtgtaatagataaagatccagatgatctgttccaagacgttttagactggcttctagactctgacgttctagttttggcgttgcatgataggggtagaattttgaaatcaaaaataatttttcgcgatcatatcctttaatcgcttcaccaattagctcttcgctttggccatccccatacatttcggctgtatcaattacactcaggccatgatcaaggccatagcgaatagctgctatttcatcttttttctttttaggatcttcacccaaaccccagctaccaattcctaaacctgttagtttttcaaaattcatcctcgttcacttccttatgttcaaattttaacataattgattcgtaattatttttatcaatcaattgacaaaatggtctattccattttataatggactagaccaacaaatgaggaggacttaattatgaaagttattgttaccgaaaataaaattcaaggtggagcaaaagcatttgaaatttttgaaaaaggaatcaagaacggtgctaaagtcttaggtttggcaaccggctcaacccctgaaacactttaccaaaactgggtaaaaagcgatcttaactgtgaaaatcttaccagcattaacctcgatgaatacgttggtttaaccccagataatcctcaaagctaccactacttcatgcaaaagcatttatttgacaagaagccatttaagaagacttacgttcctgacggtatggcaaaagacgttgatgctttttgtaaagaatatgatcaaattatcaaagacaatcctatcgacattcaactattaggaatcggccgcaatggtcacattgcctttaacgaaccaggcactccattcaacatcggcactcatgaagttaagttaaccgaaaatactatcaaggctaatgctcgcttctttgacagtatcgatgaagtgccaaagagtgctatctgcatgggtactgctaatattatgcaatctaagaagattgttttgatggcttttggtgaaaagaaagctcacgcaatcaagaaaatgattgaaggcaaagtcactgaagaagtacctgcatcaattttgcaaaaacacccagatgtaacggtgatcgtagacgaggctgccgcacaagaattagacgacaaatacaagaactaaaaacaataatttaattatcagcatagaaaaagctaggctttctacaatcgtggaagacctagtttttttatttagcagcctgtatctacaatgaaatatacttcacaaaattgcatttttatataaaaaatgaagcataattcagttttttattgaattatgtttcattcctattcgattttttatttctacccttgacttttagatgtgaaacataatcaaaaaatcacttgtgtgccacaacatatcgtattaaacttaataattgtctacatatggtatttaagaaagaatgtgattcaagttattgttttaagtgggccaattggagccggtaaatccagtttaaccagtattctagctgaacatttagggactcaggcattctatgagggcgttgataacaatcccgtattgcctttatactacaaggacatgaagcgttacacttttttgcttaacacttacctccttaaccaccgtttagcacagatcaatcaagcaattcaagaaaaaaacagtgtctccgatcgttctatctatgaagatgcactgttcttcaagatgaacgccgatagcaaggtcgctgatccaaccgagttcaagatctacgatgacttactcgacaacatgatggaagacactcctggcaatccaagtaagaagcctgacttactgatttacattcatgtctcccttgatactatgcttaaccgaatcaagaagcgcggtcgttcatttgagcaaatcagcactgatccaggtttgaaagattattacgcaagacttttaaagtactacgaaccatggtatgaaaattatcatgcctcaccaaagatagaaatcaatggcgacaaacttgattttgttaccaacatggatgcacaaaaagaagtacttaaagaaattgatgaaaagttgcatgaaatcggcaacttataagaaaaagaaggaacgtgatgacagttattgttttaagcgggccaattggagccggtaaatccagtttaacaggtattttatctaaatatttagggactaagcctttctatgaaagtgttgatgacaatccagttttgccacttttttacgctgaccctaaaaaatatgcattcttattgcaagtatatttcttgaacacacgcttccacagcattaaagacgcgctcactgaagataataacgtcttagatcgttctatctatgaagacgccttattcttccaaatgaacgctgatatcggccgtgctacttctgaagaagtcgatacttactatgagttattgcacaatatgatgggcgagttagaacggatgccaaagaagaatcctgatttgcttgttcatattaatgtttcatatgatacgatgatcaaacgaattcaaaaacgtggtcgtccctatgaacagttaagttatgattcaactttagaggactattacaagcgtctgcttcgttattacaagccttggtatgagaactacgattactcacctaaaatggaaattgacggtgataaattagacttcatggctaatccagatgataaagaaaaagttttggatcaaattacagccaaactaaaagagatgggcaaattacctgaagattgggaaaagcctaccgatattcaaattgaagcataataaaaaccattcatttgcgaaattatcgtatttgaatgattttttgtttacagtgaatttttcgctttattgttgtataatttgaaaaaatgtgtttaaaggaggagtttgaaaatgatgttaaccgtaactggtggacaatggtttttcccacttgtcataatttgtctaattttgggtattgtcgcaaccatcgctcaaaagaaaaagctgactaaactaaaaagaataaccgataactttgcctatgcaatattagttattctcttaatcattgaatggattctatattttcaaaaacaatttaattttattactccagcaatctacacccttgttgtcatctatcttattggacggcaattactaatcagataccgttcttctctattgaaaaaattaggggctaaatataagcaactgacaattggacttgctactatttacattattttagttaccttattgcttttaatcggatctaaattttcaactatgggctggatcattgctggattagttatcgtagcctttggcttcgttagctacatctttgaaaaagacaaacaataatttcccaggaaataataactcgcatagagcttctatgcgatttttatttattcaatttttgctaatgccttcgcaaccccatcatgattgttatcagcagtaatttgttccggagcaaatttttgttttagttctgctggggcattacccattaaaaatggataccccacttcttccaacatatcttcatcgttatagttatcgccaaaagcaatgcaattttgcaagtctacgccatattcttgagcaactattttgactgcactagccttgcttacaccctttaaaacaaattctaataaattctctgctgatctaacaaaagtcaaatcaggatatttagcagttaattcttcttgcatacgatcaagatccgctgaatctcccataattagacctttatgcacgccctgcagtttttcaagttgattaattgtagtcggtgttgcttttacatcgacaattctttcttcatttttaacccgtgggctcttttcttcactacaataccaaacatagccactatagatattccaagctgcatcattatcttgctcatcaacgtagcggcaaatttcagctgcttcttttgcattaaaaaaacggctgattagtactttgcctgtttcatcaagggctaaagcaccgttatacgcgataaacggacaaactttcaaaatttgattaaccactgtcatcatccctttaggaagacgtgctgatgcaggaacgaaaatattaccattaataatttgtctacgaattgcatcccgcgttgcggcggttacctttaaatcatcattaattaatgtgccatcaagatctgaaaaaataagttgtgcggacattctttcacctttatttcttttttaattcttatatcctaggataatgctttatttatgctaatgaaagctgattcaattaaatgcttttcctatcatttaaagataaattgcaataaatgcccaagtaatcattaaaataattcgcgtttacaaatttatttatcaatgctaaagtataagagttgtgttcaataagttaaaacacgaacaatattttggggagataaaatgaattttataaaaagctactttcaattagataagtacaaaaccaacattcgaactgaatttattgctggtttaactacctttatcagcatgtcctatattttgtttgttaaccctagcgtactgggcgccagcggtatgaataccggtgcagtcttcaccgctactgctttagctgccgctcttggtactgcaatcatggggatcgttgccaactacccgatcggtgaggcaccagctttgggaatcaatgccttctttgcttacaccgtatgtattgggatgcatgtttcatgggaaacagccttggcttcagttttcgttgcatcaattattttcatcttaattactttattcaaattaagagaaaagatcattgattcaattccagctgacttgaagttcgctatttcatcaggtatcggtttattcattgccttcttaggtttgcaaaacggcaagttaatcgttgcaaataaatcaactttggttggtttaggttcacttcacgatccacttgtttggattaccatttttggtttgcttgtaactgttatcttgatgatcttaaacgttcctggtgcaatctttatcggtatggttttggcagctatcttcggtatttgtaccggtcaaattgcattgccacacaaggttatctcaactgctccaagtttggctccaacttttggtcaagctatcttccacgttaaagacattaacactgttcaaatgtgggttgttgttttaaccttcctgcttgttactttcttcgatactgcaggtaccttaatcggacttgctcaacaagctggtttcatgaagaacaacaagatgccacgtgtaggtaaggccttagcagctgactcaagtgcgatggctgttggttcaatccttggtacttcacctgttggtgccttcgttgaatcaagtgctggtatcgccgttggtggccgtaccggtttaaccgcagtttttgtagcgatctttttcttaatctcaatgattttcagtccattgcttggtgttttcactagccaagttactgctcctgccttaatcattgttggagtattaatggcacaaaatactgctcatattcattggaacaagttggaaattgcagttcctgcattcttgattattttagggatgcctcttacttactcaatttcagacggtttatcatggggcatgatcacctaccctatctgtatgcttgctgctaagcgtggcaaggaagtcacaccgatgatgtgggtactgtttgtagtattcctgatcttcctgtgggtactgaacttttagatgaaaaagaatagataaagaaaaggactaagttcgaatttgaacttggtcctttttgtgtattcactaacattactttacgcgtggtgctagttaaatcgttttagttaataaaaaagtccaatcttgttagactcgacttgtaaatagtaataatagaaaagagtctgatctgattgaactgccttaagcttaagcgttttagccaccatttacaagttagttttaaagatttagtgataatttgtcggcactggtatcgtttgtatgcaccggctgagtttactcatcggcgaaatattgatcaaattaaaactacggacagtctgattttggctttacttatctggcaagctaagacaggaattgaatcacaaagaagattctgtgaatgtttcaattgtttatcacactcacgttttaatcggcgttcacgtcagctattgcaattgatttatcagatacggcaagaaatgaataaaaaggttgacctgaatggacagttcttgatcattgacagctttccggtacctgtttgccaaccaattcgaaactatcgtgctaaaatttttcgcggttatgccaacattggttataaggccaccaagaaaatttacttctatggtttcaaagttcatgccattgttagcgatgacggttacattcttgattatgtcgtaacaaaggcatcagttcatgatgccagggagacagttgaactgatagaaaatacccatccatctaattactatcttcttggcgacgaaggctatttaggcaaagaactgcatcaacagctaaaacaaatgggttacgaactttggacaccatatcgtaaaaatatgacaggagctaaaaagcacaatgatcatcaattgatggctattcgcagaacaattgaaagcgacttttcgcttctgacctattacaatgccgagaacaatcgagcacgtagtctgataggctttcaaagccggttggaaattgcaattttagcttataatttggcttattgtctagaacgatttaactagcaccacgcgtattactttttattcttatcgattataatcgataaaaacgtcaaaatcaccaatcttatcgagtataatcgataagattgcaaaaaaagagtcttttatcgactatactcgataaaggctcttttttatattacccaggaaatattaacgtacagtttctaaacaatatgattttttataataaaatgcgtcataacaggcgaattttaattggctttaaaatttcttttttctaaaaacaagatagcctaaaagggtaaaaagaactatatagcacaatgtaccaattaataattgtggattagagagatgggaggttaagtgataagttgcataattataatactgtgtcgttaaattgagcatattcaaaggattccaacgaataatatcaaccggtccaatattataatttaataaattagatgatagactgcttcccataaagataataattgcatttatcataataactacggtgtttgaattaatcatacaagacattaagcaaataaggctgattattaacgtagaggttataatatcaacgcctgttgttgaaagcatatttataaataatgactgattatacttataagtcgcagtccaaggaactatttttgctataagtggaacagtgttaaagaagatagttacaatcatagctatggcatgtagaaaaagattataaataaaaattgtaatgaactttgcaagatatactgttcctttattttgagcatgatatagtaatgtcaaaatcgttttgttttggaactccattgagaaaatagttgaacctactatgaccaaaatcaacataattatttggctagagttataacaagtcataactaacaaattgccatattgttttcccatggccaatcccataaaaatcataaaaagaatcataaaactgataatccaccaaggcagcttacggtgacctaacttatagaattcttgttttaattccgcacgcataaaagatcacctccgcctaaatagaccgctttttaaacagtaaagcgccaatccaaaagaaaactacagcgtacactaaattagcaataattaattctgaattagtcaaatgtgttacagtaaccatctcattattcgatagttgcgtaatgatattaatcatatttaatggattccaggctaaaattgatttcaaaccaggaaaagccgacattgctaaatttgaaagatctgaaccaagaaatccgattgctagtccgattatgatcactgttgcattattcctaatcaacaaaataagcattaaagagagggcaacgataaatattaaataaatcatcgttcctcccatatttaggaatagcgcattgattaagggatgtccatgataatcatcatgccaagaaaatttcgaaccaaccatcaaggtcttgagaataaacgaaaagattatcccaaataccagtaagatgaaactataaaaaactaaaacaatgaacttagctgtataaagaatggacttatgtgatgttttgtagagtaaggttgccatagtattatttcgccactccattgcgatcatatcagaactaatagcaataatgatgataatagcccattgtcctgcaccgaatccttgagataagagtgagggcgtcattttataacttgtaccaactgtatacaacattagtactaataaaacgagaatcccatacaatggaatcttgcgatgagcaaatttatagaattcgtgtgagagattaattttcattattatctcccccttgttcttgccgtaagatgttgacaatcttctgttctaaagttaagccagttggagccaaatattctatccagatttcattatcaaacagtagcttttgaattttatctatatctttatgatcaactattacagcatcatcttgtctatcaaaaggaattttagcttgttgtagcaaattggtagtttgctttatatcagttgtttttaatttagattttggatttttttcttgagtgaatttgctcataggtgaatttataataattctaccgtgattaataatgattaccgatgtcattactttttgtaattcacttaagacgtgactggaaattaagaaggctgtaccacgtgcagcgtattcatgtatcagttttcgaattaagattgtagcttcaatatccaaaccattcataggttcgtcgagaataaccagttgcggattatttaacaaagccaaagctattcctagtttttgcttcattccaactgagtagtcttttgcctttcgatcaatataatctttcatccctaatcgattaatcagtttatccataccacttaagtctttagcatagagctttaaattatcatatccagacagaaaaggataaataacaggcttttcaattaaagcaccaacagattgtagtgctaaatgatctttaagagtaatttcgtgatcattaaaactaattgaaccagtgaatttagttaatcctagcaaagttttcataatggtggttttgcctgctccgttatgaccaataagtcctacaatttcaccaggtgaaattgtaaaagatgcatctctaataatctctttgtgaccataaaaaatatttatattgttaacttttagcatgctatcctatctcctttaactccggattagacagagagttaaatcacttttctaattaaagtacctatattaaagtctagtatcctttcctgaattgtcaaattaagtgcaacagtgtaagtgtcaatgtttttgcggtagcctttaaaccattagtctaaccttaatttcttaaatatttatatgacttaaatttctgcttagcttgcttaaataactattgccagctacctgtgcggttaatgcgccatgctggatgcctaaatgaacttcatgacgcttctttaagctgtcacgggccgctgcttttaattcctgttcagtcaatacagttatttctgaatcttcaaactcgctgctaagccaaaattccagctctcgattcttgatgcagcttaagatcctaagcatgccttctgctccagattttgaccatttcttgccttgccccttaacacggtaggtatacttgcggtggttgctctcgcagcagccaatggctttagtcacagtcagttttcgtttcttaaacggcttaatatcgtcccaatgacgatcaatataattccttaggcgccccagataatcatgattgagctcggtattcaattcatcaattagtcggctttctgcagtggttaggatagttttaactttgtcatagctgtatttgtattccaaagcagaaatcagcttgccttgcaggtcaggcgcaaaatatagcctttctttgattttcttatttaggtgaaagacatccaagaaatgctcatgacgcttgcatagccctacaatgtcatcgaagtctgttttggcatatccagcaccgccatcggcgttgctaagaattacagtatcagaaagatcataagtattggccaggtactccttggcttcgttcagcgcatcaagtcggcttaaagaaacaaattccttggcattgattcgctttctgcgtttcttgcttatattgacaatgccttcacagacctgatagcgatgaaattccaaccggcttttagtgcctttgatcaccacgccatcgccttcaagatacaaaactgggacctttttcttagtgcctgcggcatcatatcttgaatctgcttcttggccagctttaatatttttcccggccatttttaccaaattgcccacctgcatatggctaatattaaagccagacaggcaattgactgctagagcagtattgcgataagtggcaacgctgcttacttctaagatgtttttgactgctaaaatactgtagcgcttgtatttgtcaaagcccattaattcatccaagggataccttgcttgtttgcctgggcagacatatcttcttctgacatacctaacttcgccaaaagccatattgattgagcgctcattcttcttatcaatctgatagccctgtgctttaaccttggtaatcatttcatcatcaactttagctaaagccaaggccatgatttccttaatcaggtttaagaagaaacagattatttttctttcacgcttaatataattatcttcagactttataatatttgcgatttcagttacaattgaattcataaaagaccagcttctaatgtgttttttgttcttaacatcagactactggtctttttgtttgagctcaagtccaaattcaaaggacttgggcttttttaattatttattcaacttaccgtaaaaaattatacacttaggcaacagttaggctatgaagaaatatattgcttgaagagttcttctgctgtctgatattggaggattcggcgatatttgtggttaatggcattggttgcctgttgaacataagcttttgacttgtctttcatgctcttgcccttagggaagaattgacgcaaaagaccattgcagttctcatttgtgcctctttcccaaggagaatatggatgagcaaagtagatctgacatcctttgattttggtcatatccgcaaactcagaaccattgtcaaacgtaattgatttaaaccaattaggatgtctgtcaatctccttttgaagcagtctttgacaagtactggcccgatagtcaggaattttgataacaacctcaaaacgagtggttctttcagtcagtgtcattaaggcaggttgatttttacgtctgacgcctttaaccaaatcgccttcccagtgcagggaaacttttctgttttcaacttctttaggccgctgttcaatcgaattgccaagattctttttatgcggagcatggccaccatgactatgatggcgtttgtttctgcgtcttttaagcttcattggcaggtcgatattgcttatatccagcaatccttgatcaatataacgatagacagtgggcgtgctaggacatggataatttggcataatcctgtgaaattcaccaacgaattcatcaatgctagtggcatcaaatttggctttaaagcgtctgcttagcattctgaaaaagacggcatagtgttgcagtggattacgcttatagcagtttctgcggcgcttttcatgataaatttgtgcagtaatagtgctcatacaagacatagctgctgtctctttgcaggacactgcctcgtctaatttcacggctgatagttgatttatgacagcctacttcttgagcgatagcattgcaggaggttatgccagaatcaagcagagcttgaatttgtccacgttgttcgctgttcaattgatgataatgcttggaaatgctagaatttgagttggtcatgaagatcttcctttcttgatttttggtcacttcaagtttaggtcttcatggcctttttgtttaacacttagtgttgcacttcaattttaaatccgggtctagtatccttttaataaatattttttactatgttcacatatgaacaataaatttaagattatctctaataaaaccgattttaggatttttttgaataaatttgctttatttgtttaaatgcagtttcaaaaccatcttttagagtattcaagccctgcagttctaaagcggcccacatcaaccgtaaattgcgatcatcatttgtttccaaaaaatttaacataaaatgcatgtatttgtatcttattttttcaaaagcaaacctgtctgtaatatctaagccagaaattattgcatctaatctttttgccttctttagatcttttttaataagaatatattctgcattaatcaaagtatttaaaatagctgtagaaaatttcgaaactgtcaaatcttttgtgtaaatagatctttctcgtaaattgattttttaattatttatttaatcaaagtaggattctaaggtgtcctgaacctgaccaaagcctttatgaattcgattgaaataacggtcattgtagctcattgcctgaatgccaataaaagcatcaagcgactgttcagttggaaactctgccttaggcttagctttgcgcttgatcacattgttaaatgattcaatcatgttagtcgaataaattgaagctctgatctgcttgggatagttataaaagaccagcagatctggttctatgtctttcaagcttctgataacatggctgtaaaccttgccccatttggtatagaagtcatgcaggacagctgtggcttcttctttgtttgtctgttgatgcacctgtttgaattcgttcatgatcttttcacgatcgtcgacgcgtactttagcgcagatattgcgcatgacatgaaccaaacagcgttgaaaatgagctttaggataagtcctggccaaggctgttttcatgccaacaacaccatcagaaagaaaaagctcaacttgctttaagcctcgggatttcatgttttgaagcatatctgtccagacttcaatgttctcgctaggcgcaatgcagtagtcaatgacctccttgtgcccattaggcttgatgccaatggcaatatagactgcttcacgctcaaatgtttctcggcgcaaaggaaggtatgtcgcatccaaatagacgcagaaaaacttgtcgcttagcttgcgtttgtggtaagcctcaacctttggaatcatctgcttggaaatatttgatacctgagctggactgtaatggctgccatacatcttttcaattagatcggctatttccctggtggtcacgcccttggagtaaagcttgataatcatgctttccaagatatccgagtgctgcttgtagccaggcagcgtgtgctgatgaaattgaccgttgcgatcccgaggcacttgcacttcaattgggccaaattgcgtatcaactttgcggaaataagcaccatttctagagttgccagtattccagccatttctggcatagggatcatagcccagaaaggcagtcaattcagcttctaacaagttattaacagcctgttgtagctctttgcgcaataaatcatttattttgtctggattgaatagagcttgagcaaaatctttggtaaaatcattcatgaaggagttcttctttctgtatgtgtttttttgttcaaaccaatcatacgagaaaggaactcctttttctaatgtttaaagaaataaatttaaggaatcattcatccttacacaaactattttacagtctcaaaatttcatttccaaatcgttattatttttaaaatagaaaactagtgaaaaagataaactataaatagttcttgggctaataagattctgagtattaccaaagaagtacacatcatcgtaataccaaacttcatctccagataaaatttttgaaaagtacatcgataatctctttttatagttatctgtaaaaatatccactcctgtaagatcgtaataagcattacaataaatggctgcttttaaaaaagttcgtttatcgaaactgtcattttcaacttctgataacaattttttagattgcgtttttaagtaattaatatcattactttcatatgcttttgaaacttctaaagttatattttttagataattcgaaatattattattaaagaaatctattttttggacatgaattacttcgagtagtttgaatactttttcaatatctaaacctgcttcgcctctttcccatctttctaattttgaacgagaaatacctactgcttccgcagctttactacttgaaattttggttgcctttcttaattttctaaattttctaccatatgtttctttcataacccactcctagttacgttcacaaataccttcaaaataatgatccagataaaggactagttttacctccttaatgatgccttaatgcaataaaaaatcaaactcataaatattacctaaattttcatttagcgctactaaaaaagcctaataccatcatcaagggtattaggtctttattacctaggaaatactaacgtacagtttccaaacaatatgattttttatgacagtttgggcaacgcaattttctagtatgtggcgtgtgtgccgcaaacataaagcttttaagttctggaacaaatttgtaatcgcaattaggacaaatatatgccactttttgataataatttttaagtaacacgaatgacattgcaatcaagcttactactaaaatagctaccgaaatataggctgcagtgttcatcttattgatgatacagtacgcaataaatgccataccgaccaattcaacagtgatttctactgctgacaatttccacattgaacgtgttacctctttgtatctagtttcattattcatgattttcgtaatgtcagtaacttccgcaatattattgggtttacttagaaccttttgtagttggataattttcttgttttgctcttctaatttttgcgtttctgctttatttctttttagttgatcttcaagcaaaagatcgattaatttatcaccatttttatcttctagtattttttgaatatcctttaacgaaaagccaagctcctttaaaaagatgattaattttaattgttttacctgctcatcagaatataaacgatagccactttcactaactcgactgggtttgaccaaacctttttgatcatagtaacgaatggttctagtggttatgtttaacttctttgctagatctccgattgtgtattctgacattactttctcacctcaaaacttaaatatacgggtttacgctacgtcagagtcaagaataagctaaattttccgtaaaaaacttcaaaaagcaaatattttgctcttttcctattgaaattattaacattaactgtataattttaagtgaatgttcactttatacaaatttcggaggactaaatgaacgcaatcagtaatttctttcatttaaaggagaacaatacctcctttaagaccgagcttttagccggtttgactacttttgtaagtatgtcatacattctgttcgttaacccaaacgtcctaggtgccagcggtatggataaaggtgctctattcaccgttactgcattgtcggctgcctttacctgtatcgtaatggggcttatcgctaactacccaattgcttccgcaccaactttgggcttaaacgccttctttacctatactgtttgtttaggcatgaaggttaagtggcaaactgctttagcagctgttttcgttgcatcaattctgttcattttgttaactgtctttaaggtacgtgaaatgatcattgatgccatccctgccgatattaaatatgctatttccgcaggtatcggcttattcatcgcctttatcggtttgcaaggtggtaagttgattcaaaacagtgattctaccttagttactattggtagtctcaacaaccctactgtttggatcactatctttggtttaatcattactattttcttaatgattgccagagttccaggtgccatcttcatcggaatgatcgccgctgctgtttttggcatagtgactggtcaaattcccatgcctaaaggcgttatctcttcagttccaagcattgctccaacttttggtcaagcagtcttccatattggcgatattaataccgttcaaatgtggatcgttgtctttacattcttacttgttactttctttgataccactggtaccttaattggtttggttcaacaagcaggtctgatgaaggacaacaagatgccacgtgctggtgaagctctagcagctgattccagtggtatgttggtcggttctgttcttggtacctcacctgtcggtgcctttgttgaatcaagtgccgggatcgctgttggtgggcgtaccggtttaactgccgtttgggttggtattttcttccttatttcaactatcttcagtccaattttgagtgttttcactacccaagttacggcaccagctttaattattgttggagtattaatggccgaaaacttggcacacgttcactggactaatcttgaaattgccatcccatgtttcttaatcgcattgggaatgcctcttacatactctatttcagacggacttggctggggtttgattgtctaccctgtatcaatgatcgcagccaagcgtttcaaagaaatcacgccaatgatgtggattttgtttattgttttcgtaatctacttcgttgttttaaatgtaaaataattctatcttataacccccttatcttacttttacattaatatataccctcacgcgtggtgctagttaaatcgttctagacaataagccaaattataagctaaaattgcaatttccaaccggctttgaaagcctatcagactacgtgctcgattgttctcggcattgtaataggtcagaagcgaaaagtcgctttcaattgttctgcgaatagccatcaattgatgatcattgtgctttttagctcctgtcatatttttacgatatggtgtccaaagttcgtaacccatttgttttagctgttgatgcagttctttgcctaaatagccttcgtcgccaagaagatagtaattagatggatgggtattttctatcagttcaactgtctccctggcatcatgaactgatgcctttgttacgacataatcaagaatgtaaccgtcatcgctaacaatggcatgaactttgaaaccatagaagtaaattttcttggtggccttataaccaatgttggcataaccgcgaaaaattttagcacgatagtttcgaattggttggcaaacaggtaccggaaagctgtcaatgatcaagaactgtccattcaggtcaacctttttattcatttcttgccgtatctgataaatcaattgcaatagctgacgtgaacgccgattaaaacgtgagtgtgataaacaattgaaacattcacagaatcttctttgtgattcaattcctgtcttagcttgccagataagtaaagccaaaatcagactgtccgtagttttaatttgatcaatatttcgccgatgagtaaactcagccggtgcatacaaacgataccagtgccgacaaattatcactaaatctttaaaactaacttgtaaatggtggctaaaacgcttaagcttaaggcagttcaatcagatcagactcttttctattattactatttacaagtcgagtctaacaagattggacttttttattaactaaaacgatttaactagcaccacgcgtataccctcatctaaccaagtagcatgtctacttggtttttatgctaaaaagatgtctgttaatagtatggatgatgacagcagattctattagatgatataataatcaaagaaaggctgtgactaaaatgaaatcatataaaaaaattcaagctaatgttgactcctcactagcacttcaagcagaaggaatttttcaagatatagggctcaataccactaccgcaataaatgtgttcttaaagaaagttgtggcaactggtggtatcccatttgaattaaaagaaactcctgaacaaaaagcctcaagagaattaattcaaagcatctcaaaaattccccacaaagaagctaaaaccaaaaaggaaattgaggattggctagatgaggactaatgatattgtagatatttatgttgcttacattgataagcctggaggaaaaaataggcctgtattaataattaaattactaaacagtaaagcttggctgctaaaaatcacttcaaaatataaagaaaaaagtgaaaatatccgaaagcattactttcccatttttgactggaaaaaatataatttagataaaccatcatacattgatactaaaaattatttaatagttactattagtgatttaaatatcgaaaaataccgaggccatttctcaatagcagatttacgcaaattaaaagattttattgacgaaaattcaaactaagaattaaactatatgttttagttcctaaacacaatctcaaatatgagattgtgtttttatttatccaaatggcatcttttgataatcatttgacgccttatgatgttcggattcttctaaattgccgctatactattttcaacaaatcgagttatgaaagatttatttaggaggaattcattatgacaactcaagaaggaaaaactgctttaattactggttcatacggtgggcttggtacccaattcgttaacattcatgcttcacacgggggtgacctaatcctagttggtcgcaatgctaagaaattagccgatcaacaaaaagaagcccgtagaaagtacaacgtaacggcgcatattatcgatgttgatctctcacaaccagatgctgcgcaaaagatctatgatacttgcaaaaagaacggttggactattgactacttaatcaacaatgctggctttggtggtcaaggcgaattcattaaaagaagtatggaacaagacatgtccatgatcgccgttaacattgaaacgcctactcgtttaactaaattatttttacctgacttcgtaaaacgcggccgttatgcctggcccacttcaagccgtttactacgctactaaagcatacgttacaagctggtcaaatgcgttatggcgtgaagtacaaggcacaggcgttacggtaagctgcttaatgcctagcgctatgcaaaccggttttatcagtcgtggtgatttgagttcaactcaattattcgcccatgcggttagtccataaggtgttgcaaaagctgggtatgaagaaatgattgaaggcaagcttaacattaccgctggtttaactgcagcccaaaaaccattcatgaaattggaaccaatgttacctaagaagatgctcatgaacaatgtttataagatgcaagaacaaggtagtagaaagtaatcaacttatcttataatatggatcaaaaggatggtatttgaatgaatcactttattttagatggtcgctatgaagacctactctcttttaacgttgaagaagcacttaaaaaagccaatattcctgaagattgtttcaaaaaccccatccttcaatgagtgaacaacaatactacaattttatggcggctattggtgatcagattagtgatccattcactccaattgaaattgcaactacaaatccaattgaatctttctctccaccaatttttgcggcatatagtagccgtaacggagatatttttatcaagcgtctagccaaatataaaaagctgattggcccattatcttttaaaattgatgaggatagcaagcagctctctattaccctaactccaagtaatcagcaatattccctaccctcttttctagttttatcagaatttgcatttttagtgggacttttgcgcaagacgaccaaagaagctatttccccgctgaagatcacaatgacatcccccgtcaatgatgagcaggtcattaacttctttggctgcaaaatcgaatcgggtaaacgcaacaccatcacttttgccaaaaaagacttgcaggtcaattttattagttataactaagcaatgtgggattatttcaagcctgaattaactaaacgcttatctgaattatccgttgatgattcaactagtgctagagtacgtagcatattgaccgaattacttcctaatggtgaatttacaattgacgatgtagctaaaaagttaggttattctaaacagactttacagagaaagttgagtagcgaaaacactacttttcaaaaacaactgaactccacccgagaagttttagcgctaaattatttacaaaacaccgatatgacaactagcgatattgcttaccttctaggctatcaggaatttaattcgttcttacgtgccttcagcatctggaaaggcataagcattagcgaatatcgtgaaaaaatgaataaataataaaaagcagatatattttctgtttttttactttataaaggaaataatatgagatttttgctataatttactttataaaggaaataatatgaaaattgctaaaaatttactttatgaaggaaataatatgcagttaaatttaattaaccgcccacagtatttaaatcaattacttcaatttcaaaatacagaattcatcaaagtactgacgggagtacgaagatcaggcaaatcttatattttaatgctttatcgtgaatatttactcaaacacaacataaatgaacatcaaatcatttatatttcttttgaagactttgataatatagatctttatgaacctaaaaagctttattcatacttaaaagaacgaattattagtgaccaaagaatgtacattctacttgatgaaatccaatatgtatcagattggcaaaaagtagtaaatagccttcgacttaatcctctacttgatatcacaattactggcagtaattccaatctattaagtggagaattagcaaccttactatcaggaagatatgtagaaatacatgtttatcctctttcttttaaagaaatgctagattttaaacatatttctgaaccatcagagcgtcagattgataacttatatgatgaatacattaaatatggtggtttccccgcggtagtgttagcaaaagaagaattaaaacaaactattctttctggaatttacaataccattattgtcaatgatatcggctacaaaaatggattaagagaaccagaattagttgcattagtagctaaatatctagcagattcgattggtcaattaattaatccgaacaagattgtaaatacactaaaatcagcaaattttgatatctcttataacgctgtgcagcgttaccttaaatattttgaagaagcatatcttttttataaatctagtcgttatgatattagagggagaaagattctttctactcaaggtaagtattacattgtagatactggtttgcgtacccaagctttaggagaaagaaataatgaccgcggtagtgttttagaaaatatagtttatgtcgaattacttcgccggggctacacagttcaaattggtaaattagataataaagaaattgatttcatcgttttcaaggtaaatgataaacaatatattcaagtaacctaccagcttccagaaaattctactagagaaactgataatttacttcaaattccaaataactacaaaaaaatagtcatcactggccgatatgaaaatgaagaaatgatttccggtattccaataatcaatattaaagattggttattaagctctaaaaactgatcaaaataggatcgactaactcatgtcgatcctatttttaaattaaattatgttttttacaataagtaaaaattccgtcatcttgcacgctgccacagatgtcatcagcaatttccttcacatcgtctgttgcgttccccattgcaacgccgtgaccaacagtctttaacatttcaatatcgttgccgccatcaccaaaggctattgcttcgctcacagggatttgataataatctaacactttttcaattgctacacccttactaccagtagctggaataatatctgctgctctatcccaccaagctgttaccttagcattttgcgtattagctacaagtccgtcataatctttttcacgacagcctaccattatttgataaaccgtatcctgatcgacaaccacatcaaaatctggcgccactctcaaatccgttccaccaatagcaaagtattcctttaaatcctcatcaacaccattagctgcaatccgtgttttggtagctacagctaacggccgatttattttctgagcattttgaatcatatgcaagacatctccttgccttaacggattatcaaaaacaatgtcttgatcgttatagcagtaagaaccattaaaagttaaatatgcatcaaaatctacacccaacttaggcagttgcactggtggtctgcctgatgcaatacaaatcataatgccgttgtcttgtaaagcatgcagtgtctctagcattttaggtgtaattgattttttcttttcaattaaagtaccatctatatcaaaaaatattatcttaggtttgctcattatttttaccttctaaagaattttctactaattattatactttaaccgatatttcccaggaaatattaaaattgagctctcttcctcaacatctgtgctaaactagatacaattagtttctttaaaagttaatagttacggaggaatttttaaatgcagacattggaaaaagtctttcatttacaagatgctcataccactgttaaacgtgagttaatcgctgctttaaccacttttgtcagtctctcctacatcttattcgttaacccaaacattttgcacgcagctggtatccctaaaggtgccgcttttactgtaacagctcttgccacagcagttgggtgttttttaatgggttttattgctaattatccgattgccttagctccaaccttaggtagcggtgcctttttcgcttataacgtatgtgttgggatgcatatttcttgggaaacagctttggctgcagtccttgttgcttcagttttattcattttaattactgtctttaaattacgcgaattagtggttaatgccattccacaagatatgaagtatgctatttcagcaggaattgggttattcatcgcttttattggcttaaaaaatggtcaattaattgttaacagcgattcaactttagttactctgggaaaatttagtactccagcagtttggatcacattatttggcttaattttgactgttgtattaatggcattaaacgtgcctggttctatctttattggaatgattgttactgccatcttcggtatgatcattggtcaaattccattaccacataacatcgtttctggtgccccaagtattgcaccaaccttcggccaagcggtttttcacattaaagatattaatacagctcaactttggatggttgtactaactttcttattagttaccttctttgatactgctggtactttaattggaatgactgaacaagccggtatggttgacaaggatggcaagattccacggatcggtcgtgcttttttggctgattcaactgctatggttgaaggtgcagtctttggtactgctccacttggaacttctgttgaatcaagtgccggaattgccatgggtggtcgtactggtttgactgctatctttgttggtattttcttcattatcagtatgattttcagcccattgttacaagtaattccaactactgtaacggctcctgctttaattatcgttggtgtactgatggccagcaacttaaagaaaatcgattgggaaaagttcgaaattgcctttcctgcttttcttaccgttgtagggatgccactgacttactcaatttcagatggtttggcattaggcttgattgcctacccaattaccatgattgcttctaagcgttataaggaagttagtcctatgatgtatatcctgttcgtagtatttatcatctttttcttagttacgaatttataaaaagaatgctaaagataagcagtttgaagctgcttattttttattgacttgatttttattttgtactactgtaataaatatataagacagtttttatgggagaagaaaaatgagactgtaaaatagtttgtgtaaggatgaatgattccttaaatttatttctttaaacattagaaaaaggagtacgcgtggtgctagttaaatcgttctagacaataagccaaattataagctaaaattgcaatttccaaccggctttgaaagcctatcagactacgtgctcgattgttctcggcattgtaataggtcagaagcgaaaagtcgctttcaattgttctgcgaatagccatcaattgatgatcattgtgctttttagctcctgtcatatttttacgatatggtgtccaaagttcgtaacccatttgttttagctgttgatgcagttctttgcctaaatagccttcgtcgccaagaagatagtaattagatggatgggtattttctatcagttcaactgtctccctggcatcatgaactgatgcctttgttacgacataatcaagaatgtaaccgtcatcgctaacaatggcatgaactttgaaaccatagaagtaaattttcttggtggccttataaccaatgttggcataaccgcgaaaaattttagcacgatagtttcgaattggttggcaaacaggtaccggaaagctgtcaatgatcaagaactgtccattcaggtcaacctttttattcatttcttgccgtatctgataaatcaattgcaatagctgacgtgaacgccgattaaaacgtgagtgtgataaacaattgaaacattcacagaatcttctttgtgattcaattcctgtcttagcttgccagataagtaaagccaaaatcagactgtccgtagttttaatttgatcaatatttcgccgatgagtaaactcagccggtgcatacaaacgataccagtgccgacaaattatcactaaatctttaaaactaacttgtaaatggtggctaaaacgcttaagcttaaggcagttcaatcagatcagactcttttctattattactatttacaagtcgagtctaacaagattggacttttttattaactaaaacgatttaactagcaccacgcgtaaaggagttcctttctcgtatgattggtttgaacaaaaaaacacatacagaaagaagaactccttcatgaatgattttaccaaagattttgctcaagctctattcaatccagacaaaataaatgatttattgcgcaaagagctacaacaggctgttaataacttgcttaaagctgaattgactgcctttctgggctatgatccctatgccagaaatggctggaatactggcaactctagaaatggtgcttatttccgcaaagttgatacgcaatttggcccaattgaagtgcaagtgcctcgggatcgcaacggtcaatttcatcagcacacgctgcctgactacaagcagcactcggatatcttggaaagcatgattatcaagctttactccaagggcgtgaccaccagggaaatagccgatctaattgaaaagatgtatggcagccattacagtccagctcaggtatcaaatatttccaagcagatgattccaaaggttgaggcttaccacaaacgcaagctaagcgacaagtttttctgcgtctatttggatgcgacataccttcctttgcgccgagaaacatttgagcgtgaagcagtctatattgccattggcatcaagcctaatgggcacaaggaggtcattgactactgcattgcgcctagcgagaacattgaagtctggacagatatgcttcaaaacatgaaatcccgaggcttaaagcaagttgagctttttctttctgatggtgttgttggcatgaaaacagccttggccaggacttatcctaaagctcattttcaacgctgtttggttcatgtcatgcgcaatatctgcgctaaagtacgcgtcgacgatcgtgaaaagatcatgaacgaattcaaacaggtgcatcaacagacaaacaaagaagaagccacagctgtcctgcatgacttctataccaaatggggcaaggtttacagccatgttatcagaagcttgaaagacatagaaccagatctgctggtcttttataactatcccaagcagatcagagcttcaatttattcgactaacatgattgaatcatttaacaatgtgatcaagcgcaaagctaagcctaaggcagagtttccaactgaacagtcgcttgatgcttttattggcattcaggcaatgagctacaatgaccgttatttcaatcgaattcataaaggctttggtcaggttcaggacaccttagaatcctactttgattaaataaataattaaaaaatcaatttacgagaaagaactatttacacaaaagatttgacagtttcagaaaaatgaaaatcaaaaaagtactactgaccacgtctttactcacgattagtttgattactctatcgggatgtagtttccacctgtttaccaacaagaattccggtcctacaatcaaacgaactttgtcctctaagaaattcaattcacttaaggtagccagtgacattactgatgttgaattacatgcaagtaatcaatacaaagttatctatcatgggctcaagcgtttcaaacctagcgttaatgtgaaaaatggtcagttaaagatcactcaaactagtaatggtgtttcttataacatcaaagaaggcaatacagtggcaatctacctacctgccaaagaattacaaaatatcaatattaatctttctgatggcgatatcgatgctgatggcaaggttcaagcaaaaaatgtcaaacttcacagtgacgatggtgatgtcaactttgacgatttaagaattagctctggcaaaattacctcagatgacggcgatatttcagtttctaatctacttactagaaaaggcgccacagttgaatcagatgatggtgacattcgtattagaaagagcaatgccagtggttaccgcctaacttctgacgacggtgacgtcacattcaagggagatacttctgataatgatgacggtggttcttactacaaaaatactaagagttctaacctgctctctgctcacagtgatgacggcgacgtcaacgttaactaaatttcgtcataaggcgataagtttcacatgaaacaaaaaatcaatgcatcattgataatgcattgattttttacttttttcctcattcatagcataaacacgactttacaagattatttaagtttctattgaaatagacataattttaatacgaaaaagataagactaaattctacttttccattaaaaaatatttaccaattttccattttctaagtcaaaatgatgcgtaaatttcttcatcgtcgttggtgaaatatggtggtcaatttcaattactgttaatggcgaattcaaaaagacattatgaatttgctcagcagtttgcggatcaagtgaagcagttccttcatcaactactaaaatttctctttggaatagaaaggcacgcgctaattcaattctttttctttccccacctgaaagattatgcccatttttttcaattacggtatctaagccatgtttttgaacgtaattagttaatcatgcttgttgaaccgcagccatgatttgtttttgatcaaattgtttaccaagagttaaattaaatcgtaaagtctcattgaaaatttgcgaagtttgttgaacttcactaaaaatttgcgtttcaacagactgattattaaccaaaactcttcccttctgcggagataatttacccattaacaccttaagcaaagtagatttaccttcaccggactttccagtcaacagaattttatcccctctattaacgcataaactcacatcattaagcactggactatcagcttgatagccaaaagttacattgtccacatctaattgctcaaatttgattggagcctcatcttgcttagttgttaaaggtttgaaagacaacaacttagcggtcattggtttagtggcggcaatctgattacgaatactattaatactaaagaaactatttacaatccaagcactagagtattgcacggccacaaaagaagccaaagcaacgtgtccttgaattaccataataattccgactccaatcggtaagaagtctagtgagtaagctaataaattaacgtaaaaatcactcttagcaattgtatcgtcacgttcacgtttattctcaacagaatttttgattactttactactcttttttacaaatagagataatacattgtaatttaaaaccgtattgatatttttgagtaaatccgacataaatgttacataactacctgttgatttactccaatcggatgactgcttggctgttttcttgctaaacaaactaggaataaagcttgaaagacttgcaaaagcaacgaagactaatgtcaagactacactatttatcagcgcaatagtaacgatcccaacgattttaaccacagtagatactagtgaaaataactgtctaaagtacttttcttcaatcaagttaagatcattattaatgaaagaaattcgattagaaatttctttttctcctgtttttacaaaatccgtttgcatcaaatgctcacgaaccttttgattaaatagtgctacgttacgattaattactcaattatttaagtattctacaattacaagtaagatttgtaacactgtaattacgataatcattctcaccgtatttggaatacttttccttgtaactaacgcaaagatttcggagtatgaccatgtgctaaaaggcaaagaagtccgcttaaacatgacagaataatactgagcgaaaaccatttgaggtcaataaactttttcataaatgaatctccctttcaattaagttggattcattatctgctttagttcacgataaaaatagctttctgcaaaagtgatcttcaatctgcatatatgcagattattctggaagaatagacagaatattttctaaattacttgccttgatcaatttcttaatagctaatacctgctctgtatctccagcaaaatagcattgataaaaatgaccaatgattttatataagactaaagatggcgtttgacttaattgcccaagtaaataaataggctctttattatcttttacaaatttattttcagcacaagtatataaataattcacacaaatagtggcaattgttgtttgcattttttctgtctgctcagacattttatcattataagtagtgaaaattttttgaaagaaaaaagcaaaatcgtcatgagtaaagatagaggtaccaaaattggctaacaaatctaaactaaatttatcttgaagccaattgtcgcctgcaaacaagcgttgcagtactatatttttatctttgacatcaaatttacgttttctttctagcaaggtaagaatcaacttagctttgattttcagaagatcatgatgcggcagttgttgaatttctgttaccaattttctaacttggttaaagtcttgattataataagcagtctgtaattgatcacctaaattgttttcatcgtcagcttgtgcgactgaattttgcttaaagaattcatcaaatgaaattttatttttctgcaaaattgccattaagtccttagctgatatttcatgcaatccgcgctcaatcttagaataatgggcaggtgataaaattcctgttacaaattgttcttgcgtcagtccccgcgattggcgcgctttttttaatgctgtgttaatttccatagctgtttttatttcaatttacggtcccttttagatacaaaccaaattgtcccatcagaagttgcccagtgtccatcagaagttttatgaaatttcagcgtcagtttcttactgtgtagtgtccagctatttttaccttccattgtgacacggacccggcctaatttttctgaatttattttgttattgtagtctttgggatcatatgaattatgcccatatactttataaattgcttttgctgccgcagtatttggcttaatgtatttataagtaccagatgcatcagtcttaaaaactgggctggatgcatcgatttgaccactatttttccccagagctatgttcaccaacatgccaagatgattttccattacagaatctgtttgatggggatcataggttgtaagatttttattagcaaactgttctggaatagtttgctgattgcgataaaacaaccagccaccgactgccagaactacgactactacaacagttatgattgtagctttctttttcataaaggatcacctgttatctatcagcttttttctgaaaagtaattaatccgtgtgaaactaatctaacagttccgccataataaactacccaacgtactttgccattactgtactcttcatacattctctcccgctgaagatatccattatatgtaccatcattataaggaatttccatcggagtatctacagcaccatcataagcgccataacgcgtcttatgccatgggcctgttctcttaactccatgaacttttttagttaacggtagtttttgaacgttttgaactgaatctgtactagattccgcagcagatacaacagcagtattagtggttgcaaacagagcagttgctgagaataacactaaagttgcttttcttaatttcatatctaacaccttatacctttcttttattgtttattttcattacctagttgttcattatcattgacaacaaaatttgtcatcattttctttttacttgctaatgtaggaattgggtagcttttaagtttagtattatacaaatagccaccgtacataattcctgttggattatgccccattggaacagtgtacatcttttccagatatcctctaaatacctcattgcctcttcttacagtgtaataaacataagtaccctgatcatgatagtattgacgttgataccagatatgttcaacaaatccttttgattcagtgctttgtgttgcagcttgtacatggtttgattgaaccaaagctgaagttgaaactgatactagtgataaagctaatgctgctttagctgttaaagttaaaattttcttatttcttttcataactttaacctactctttttttcttttcttgctttaattactacctaatccagacggaataggaacccatggacccatatttttctctcctttcttatttatttttcattaattttactttcactactaagaactgttcagaaattgtcaaagatgacaattttctacaataaaattcttaatcaaatgagacattccattacttttcataaattcaataatctgatctacttcttcatttttgccatcaaaacaataatggtaataattggcaactattttagcaaaagcattacgtggaatttctggcaatttagaaatgaaatcgtaaattagatttaaatcaattttccttctttgtacgtatacattagccaaataattaatagctattgctgacattatttcttgtagctgaccagacagattagatacattatggcgatacgttctaaatattgaattaatcaaaaagtccatatcttctggggcatatatcatcatagtcattgcaaaaatttgtagagtagattcactccactcatcagaatcaaagacaatttgtctaacttgtcgtttaatattctcagatatttgatcaatttgtttctttaaagatgctattgaaaataccactaaagcataaagattaaatatattctgactttgatttttatattttccaatttcaattttcaaatcttcaagtcgttcgatctgctgatgataatatgcatcttctaattgcttttgccagatcaaatttttgtgagcaagatcattttcactatcttcattttctattcgctctaaaaatatagaagcttgcaatccatgttgctttaacaaatcaattaaatcctgagtctgaatatcatttaatccacgttcaatttttgaatagtaagatgttgataacacatcccccgccatttcagtttgtgataatttcatactttttcttgtttgttttaatgcttcaccaattgtcatatctttccctccctcgtattatcatatttttcattattgtataatgttttgttaattttgcaatagtttgtaaaacaaaagcattatttttatttttcaatcttttatgtttacaaatgtaaacttagcaagtagaataaaaaatgtgaagagatgaaaataaattatttaatttggaggttacggtcatggatgtaactaaaatcattatccttgttgtcgcaatcgccttgatcggctttatcctttggtggttcttcggcaaacatgacgaagctatcggtaaagcaagtgttaatcaaggcacacaagaagctaacatcgtcgttaacggcggttactctccttctaccattgttttaaaacaaggcgtaccagctaaggtgaattttgatatgcaagactctaccgcctgcttatcgcacgttgtttttgaacaacttggcgttaacaaagatttaaccaagcaaaaaatcactacaattaatatcccgactgataaaaaaggcacttataacttcgcctgcggaatggatatgtttcatggaaagattgaggtcaaataatgagtattttttcaaagaatcaaatcaaaaaagttgtcgttaatgcagataatcacggttacaagccagatgtagttaccttcaagcaaggcaagcccgcacaattgaaatttatcccatcagataatatgggctgcatgaatgaaattgtatctaaagacctgggcttcgatcataagctcgatggtcaaaaagaagttgtggtagacatccctaccgaccacgcaggaacttataattacgcatgtggcatggacatgtttcatggaaagatcgtagttaaataatgaaattatctaatattcagcgtttctggatctcctttgtactctccatcccgatgctcattcagatgattgccatgccatttcactggatgatgccaggatacaactggattgcccttattacgacaaccattatcatggcaatctcagctgcaccatattgtaagagtgcttggggcgccttcaaaaagcataacgctaacatgaatacgctagtggccgtcggtactgctgtggcttacttttacagcatctacgctatgttcactggccgcgaagtttacttcgaaagtgctgcttatgtaacggtctttgttctacttggggatgccatggaagaaaaaatgcacagcaacgcttccaacgcactagccaagttagtcgacctacaagctaaagacgcagcagttttacgttacggtgaatttgtcaaagttccactcgaacaagttaagccgggtgatacaattcgcgtaaagccgggtgaaaagattccggttgatggtgtcatcactgatggctcaactaccatcgacgaatcaatggtcactggtgaaagtatgccggttactaaaaagaaaggcgacaatgtcgttggctcaacgattaacaccaatggtactttcacttttaaggctaccaaggtcggtagcgatacgatgcttgctcagatcgttgatttagttaaaaaggcccaaaccagtcatgctccaattcagaacttgaccgacaaaatttctaatatctttgtcccagtcgttttaattattgcaattattaccttcgtaatttggtatgttttcttaggcgcaacattggttaatgctatgctcttcgccgtttcagtagtcgtaattgcttgtccatgtgcactaggtttagcgacaccaactgctttaatggttggtactgcccgtagcgctaaaatgggcgttttaatcaagaacggtgaagttcttgaagaagttagcgacattgataccgttgtgtttgataagactggtacaattaccgttggtaagccacaagttactaatgttgtaggtgataaaaacaaggtcttaactattgcagctagtttggaagaaaattctgagcacccactagcaaccgctgtagttaaagctgctaaagaagcaaagactgaaattaagtctatacaaaactttgcagctattgaaggccgcggagttaaggcaaactatggcaatcaagaagcttttgttggtagcgatcgtttattagaagatatttctatttcccaggaaatgaaagatcaggctctccaacttcaaaaagaagcaaaaactgtagtctatgttggcctaggtaatgacatcattggcttaattgccattcaagatgtacctaaagcaagttctaagcaagcaattgcggaacttaaaaagcgtggtttaaagacggtgatgcttaccggtgacaatcaaaatgttgctgaagctattggccgtgaagtcggaatcgaccaagtaatcgccggtgttttaccaactgaaaaagccgctgagattaagaaattgcaggatgaaggcaataaagtagcctttgttggtgacgggattaacgacgcacctgcattgtctacagctgatgtcggaattgctatgggatcaggtaccgatattgctattgaatctggcggtatcgtccttgtacagaatgacttaatgggcgtagttagagcgcttgagatttctaagaagacctttaacagaattaaattaaacctcttctgggctctgatttacaacacgatcggcattcccattgctgcaggtttattcatggcctttggcgtgcagcttagtcctgaacttgcaggcttagctatggccttctcttctgtttctgttgtaactagttcacttttattgaataaaacaaaaattgctggtgaaacagctcaagtttcaaagtaaaataattctccgaccggatattttaatccggttttctttttgtaaatttttcaatttgcgacttaaagtttcagcagtaatacccaaatatgatgctaagtctttcttttttaactttaattccacatttttactcccctgtttttgagctaagtcttgcaaataggccattaagcgttcctgagcatccattgaattgcgccgaatagagttagtttcgattgtaaccagctgctcgccaaaattattaagcaaattcaatgctaaatctggcgtctttttcaataacttttgaaaatcacgacgctcaatagaacaaacataagtatcttgtaaagcctgcacaaagttttcctgggcatgttcttgaaaaagattctgctgtccattagcatcgccttgattcagcacacctaatacggtctctttaccgtcttcgttgagattgtaaatcttggcactgccttgatccataaaaagcattccgttcttaccatcacctggttgtcgaataatactgccttttggaaaatattcttggtgcgttgaaattggtactagtttttctaacatttcatttggcaaatttttaaatatggctgctttgcgaatacaagccatgggtgaatgttgcataaaagcctcatttcttgatctaagtcaatttatttttatctgcatcttaatacaatgtatttaacaactcaagcagaaaggaaatattaatcatgactaaatacatcgcacatattgagcctttaaacgctgaaaaaattggtactaaggcacacggtactgccacttttgaagaaaaaggtgatcaactacatattcacgttgagatgtttgatactccagcaaatattgaacactgggaacatttccatggcttcccgaatggtcaaaaagctcatgtaccaactgcagctcaagacgttaaccatgatggctttattgatttaccagaaactgagccggtctcaggaactacaatggtgccacttgatgatgccccagaaaacatgaatattcctcatgatggttatcctgttgccgacagtaatggacattatgaatatgagattgatgtctcattaacaaagctacaaaagaaattcaaagctgcctttggtagcgataaactacaactagacaagcgtgtagtttacgttcatggtgtacctgcagatctggaattacctgatactgtaggtggttgcgtaatgagttatgatgcccatactaccttgccaatcgcagctggtgaaattgaaaaagcttaagttaaaagccattccttgtgaatggctttttgcatcctttcttattttttgatagcatagatatagattatgtaaagtatctaagaaaaggagatgttttataagtaggcttagatcctactcttatggagaataacgaaaaaattatccaagaaaagaaacgcgaaaaatttattaaaactaaaaagaattacaagcgtgcaccactaatgtcagttcacttaagagtgatgatggccgttatcttaggtcaaatcgcctgtggctattccctgggaattagtggtaccgctctttctaatgcagctaaatatatcaacattagtgacttctggactggattaattggggctggtgctttaattggccttgctggtagtcttttggtcggtcgactttctgataaaatcggtcgccgtaaactcttaatgtggaatatgtatatattagctgctttttctttattacatctaataaccgctaattttagcttaacctttatcctccgtattggaattggtttaatgattgctgttgactatactgtagggaatgccttgttaaccgaatggctacctaagggtgaagacagcaagcgccagagtcatttattaatctactggactattggttttattttgtcttacctagctggtagttttatcactggatttgatagttatacttggcaaataatcttagcaacaagtgcagtacctgcactagtaactgctatcttcagaagtcttttcccactccctgcttcaccaggctggctagcaagtaagggtaagattaagacggccaacaaggtcattcgtaagcacatgggacgcaaatggagattacctgcccgctttatgaagcggaataaaaagaaaactcctagaaatatttcctgggcaattttattttccaagcaatatctgcgacgtactctagtaggtgggattttctatgcctgccaagccttctcatttttcggtattagtatcttcttgccaattttattacaaagcatgaatatcactagtggaaatatctcaggaattatctacaatggtgggatgttcattggtgtgctaatcggtacctggatctttaacaaggttagccgccgcttctatcttatcagtaattttctaatctcaggtctgctaatcggcattttagcaatagtacctaacttaaattcaatacttaaattaggtatttttacgttatttgcgattattttatcagctggtttgatcctagattatccttatccgactgaattatttgatctgaaggtacgagcaactggtgtaggtacttgtattacaatcagccgaatcggggctgccgcagggactttcttattgcccgtcttaactaatgtgggtggtgctagcctggcaatgctagtttgtgcgattgttttactctttgcctttatcgtttgcctcatctgggcaccggagacctcaccccaatttatgaaaaaataaaataattaatatgctacacaaaaagacagattacatatgatgcaatctgtcttttcttatttcttatcttttttcttcttgtccttagaatccttatttaataattcttctggatccttatgcttaggcgtcttctttggatctggtacagttgcaaagcgatcaagcatcttctgtaagttattagggttgtcaaaagttaatcccataaaacatcttcctttcgttttctcaattatattaaaatttcaattcaaatgacaataattttaaccctcattatcaataaattgttgcatcttaatcatttctgaaccagccagatcaacactaattaaatcactataatcatgaacactagtatctcctaaaccatattcagttacaatttttaggtcgaagccactatcagagcgatcttcaattaagcctaaacgatcaggataatgataaattgaatcactaattttcactatttgatcttcgggccaattatcaataatttctgctggtgactgaatttcatcccgtaatttaactgaacgctccagcctgtccggatcaaaactgccattatttttttgccattgaactaaaaaattaaagaagagcaagcgctcggaatcttcagtaatatgcgttatatggctcctagcaatcactgcaattgattcaacctgccctaactcattgatgctctcgaataccagattatcatcgtcatacttgagtactttaccaatagcaaaactaccatattgatcatcaaaggtataatcaaaataaatttcaaccagatccaagtcgttagtgaattcttgcttctgtgattgccgcaaatattgggtaaataagcgattatcaatggcattagtatcgacacaaacaatatcgtcaagtggtataacggtggcataatgctctaaagttaattcattgcgttctaaaatacgcacctcttgctgatcaagttgagtaattaagccagtgtaagtagcacctgtattcacctcaaaagttgtaaagggttgcgcgtcagctacgttaatcagtaaatcatgcagattagtaaaatcccaggctaacactgtcttatttaattgctctaagttaaatgaatccttaacttgggtaatcatataatagcgtagattaggcgtatcgtcttcaatcttagctacttgatcttctttaataaagactattccacctaaattaccgccttgatcgactgattcaaaggtaatccagccatgatgttgcgtgataatgcggccaatatagtaagaatttgcatcaactaccgtaatacttgcatccccacctaagttatatttttcttgatcagccttaagcgtgatttgtacaagtttattcaatttttcgccccctcttttttcttccgtgaatttaattgtcgcctaatcattatttttctgcaagaaaaaagaagatggtttagccatcttctaatattgagttaattctgtagaattttggggctaacgaatattacttcttttgtgcagctgcctcagcttctgctgctgtgtttgaaggggttaacgaagtactgtttggatcaaaacgcacatcgcttgcttttacataaccatcagcaaattggacttcaccttgattactatagacagatttaccaactaagtgataaaacagttctgccttattttcacttggtacccagatgtaaagcaacttatttaccttgtatcttccaccttgttttctaacttgatcgcccttgaagtcaatcttgtttccgttagcatcatagatatcagttggcttaataaattgaattagtgattttttagtatgataataattttgaactggaatatctttagcagctttaacattgaaattataaatccaataatcagttcccttaatatgatagattgctaattcgttgtcatcgtcaccatctctaccagtatcagcacgtgtcccttgctctaaacgatccactgtaaacttatcaccttgttttgcgtattttcctgaaggctgaactgcatctttatcaggtacttcaacaaaaagagcagcacgtttatcagttacagtaacagtcgtttcttctgatttagttgtttgagacgaagaagaactagtgttgttatttgtattaacactaattacaggacctaaattataagacttaatgtactgtttattaggtccacctattctaaagtaatgctttccgttcttaaatttgtatgaaccgccataagtcgtgatagtttcacccttatacaatttccaacggttattgtaagaggttctgccagttgaggtacgataaatgtaagtattatgagtaatcttacgtgttacaccatcaatgttggtagcctttatgtattgatccttgccgcttactttatagtaaagcgagccgtcaattttcacagggttgctttcaacagtgacatattgataggcattgtattttacacctgtgctgttaccatccttgtcgtaagctaaagcagtatgcataactgctttagtcgtagcagcttgtacttcattagttgtattagtcaaaacagccaagggtgcaactgtcattaatgtagctgcagaaattaatgcaatcttatttttcttcatcataatcatccttttcaaatctctacactgctattatattctctaaagctaattaaagcattaaaaagaagccaattaagtgaagtggacttctacttttgatattttcttttaatttattttttcaatgccgttgcctcagcttctgctgctgtgtttgaaggggttaatgtcaaacctatattaacaaatttaacatcactagctttaacataggcatcattaccaacttcaatttgatcaacgttacctgtagcatagaacttagtaccaactaaatggtagaataattctgccttgttttcacttggtacccaaatgtatatgagtttatctactttcagatttccaccttgttttacaatttttgcgccattgtggttttgcatagtaccgtcagcattatacacatcagtatccttgacaaatttgatatagccataatgttcgtgatcataatcatgctttactaattttttatcggcagttacatcaatagctaaaagccaattgtctgtaccttttattctatacattccagcttgtgctgcagttgatggaaaatgatcagcaaacggagtaacttctagtttatctacaataaacttcgtaccagctttgagattctttttgattgctttaccttgattatcataaatatttacaccgtaagcattttttacggtaacagttgcttcctcggcattagtattagtagcgttgtttgattcattgctggttaaatttgatgcagtattagtactaataactgggcctaaattatatgatctaatatattgcttacgtggcccacctactctaaagtaacgtttaccgtttttaaatttatatgatccaccatatgtagttacggtttcacctttataaaatttccatttcttactgttggcagtcataccataaggtgtcctttgagtagaagtccggtatatataagcattatgagtaatctttcgggttacaccatcaatattagttactttgatatattcatctttatctgtaactttgtaatattgacttccattgatagttactagttttggatctacatgaacactaccataaacgtaatatttatgaccggtactatttccatctttatcataagctaatgcgttgtgcataatagtcttggttattgaagaatctgcttgtactgtatgagcgctagttgtagtactcaggataggtgccgttcccattaaagctactacagaaattaacatgattttattttttttcattattaaccaccctttgaaaatctctatacttcaattatcttactttgtataaacttagacaacaaaaatagcatcaaatcatattgatttgatgctattaaggctaaaatttacaaatttagtcccaagctaattcataaaccttatttgaaacagttttatttttaccgttaacattagcatggtatgcaacagttaagtaaccgtgattttcatcaataatttggatactttcaacttcactatgttcacctgaaatatctaatccaccaaatgcacttaagtttacattttcccattgagattgatcattacgtgcataaaacggaatttttacaatttccttgtgatagtatgaccatgaaccattacttaaacttggtgatttttgactagtaatataaatattaccagaattatcaagatcataaccttgtacagagtttaaaacagatccatacaaaccatatactgtaaaactagtttcacattgataatttcccatatttacgaaaccattatttccagcctcatctaatgcattattaatgacatttaggtcataaattgaaaagtggcctgttccattattctcaatagtagcaattaaaagcatactataatctggtgaaactgctacttcagcgcgttccatttcatcaccagagcattgatcttcaggattacctgcgcggttcaagtatgctaaacgtgggaattcagtatttgatgaagcatatgatttgtatctaatatctgctcgagcaatttgagaagcccatttattcttgtttttagtaccaacgaaccatttaccagatctacctgaatattcccaagtttgggtgtgtccagctgctgcacctactaaagtaagcacaggggttgtcacgttgccacggaagccacgcaatacatgtgtttctgtctggttatttcttaactgtaaaccataaacatactttgatcctacattacctttttgaactacagctctgtaacctgtattcatatcgaatctatctaaaattctaatatttgttgcatctaacataataaaacctccgaaaaatttaaaaactactacttatcctgagtttgctcattcatctgtttagccacttccgcaaagatgtcctgcacttcttgcctgttcagcttgaagccttttgcttcaaggctgttcactactgcgttgccaacacggttaatcttctgttcgtcagaaagattttctttgtcgtataagcgtacatagcttttcattaagctatctgcagtattgcggaattgctctaagcgtttattcttgaaatgaactctgctcaagatgccaatacctactacgctaattacccataacgccagagtaatcagctcaacgtaatcatgaatatccataattgaatgaatcacctctcttttgatcaaacgatccaagggggctaacgaatgtccattggacttcacctctgtttgataatgttcaacaagacactaatacacttgatttatattagtttttagactaatataaatgtataagaaataaccgaaagctggtaaatgttccgccaagaattttattaacttaggttgttttctttttcatatctcgttgacaatatttactataagttaattaactaattatgtcaataaaaaaagctaaaaaactattattttttcgaacaagtattcttgaaaggcttggtatgattgagttagagcgcacaaaagaattagcaaaaaaatacaaaatgaatctccgtgaagtaaatgacaaggcaggtttaggtagaaattccatctataattggaagaatcaaagaccaggaattgatgcacttaatgcagtcgcagatgtactacatacgtcagccgattatttaagtggtaagacaaacaatcctagcccgtcacctaaaggtgatgaaactggtggtatttctattgatggtgaagtaccatatttctatcatggctacactattccagaagactacctgaacatagttcgtcaacttatggaacgtgatatcaaaaaaggacttattaaacgacatgacaacagcagatcagaataaacaagaactcatagactggttattagcctatgctaaaaaacgtgatattatggttgaattagttgaagtaaatccaacttacccatccatttctttaaagaactatagattcgctgtcattaatactaattggcatcatcaagaagaagtaccattttcaataggtcatgagattggtcacattatgctgactaatggtgaagtagattctcgtcaatatatcacttttacagaacagaattccgaagaaagtccagcagacatcttttcaataaagctaatctataattactcctgcaaaatgggtgattgcttcgaagatacaggtttatttatgcaagcatacgggataccaaatcgagtagctgatgcaactaaagagatatttaagcgagcagcttaaccatcaacttctatattgatttgattactaaaagttttagcattagtttttacactacttaaaatccaattaaacaaaaaatcgctactcaattgagtaacgattttttctatccatccagttcaacgccttgcaagtccttcatcttgctataaaccgcgccacgttgacttgaatcaaactccagaataagcatatctccgccgcgaattacggtttgaccatttggtatgatctcatctccatcgcggtgaattgttcttaccctagtatcaaccggccattgaacctcagaaatggttttatcaaccagtctactgctctcatagaccggcagagccattgtatcagcctgaccagtatagttagccttatggtcactactcttgtccatagcggctgctagaagcccgtagataggcttaccgccaagaagttcatcaactaataacgcaatgaaggccaccacagctaatggcatcaagtgaagtaaggaccctaccatctcagtaattaagataatcgccgtaaatggtgcacgaatgattgctgcaaaatatcctgccattgaaaaaatcactaggttaactactaaacgctgcggtaacaagcctaactgtaccatcatcagtccataagttgcaccaatcaaagcgcccattgtcaaaattggcaggaagataccactaggaagacctgaatcataagcaacaatggagaaaacaattctcatgacataatagaaggctagcatccctacaatgccccaacctgttttagtgattatattcggcaatgccagaattaaccgattacctggaccggtgattaatggccaaaagtaagcaatcgggattaatattgccaaaggaataagtccatgcagccaacgaggtaaaatggtgattttagcatagaccttctttaaactaaataaaccaactttatataaatgacccaataagcctaataaaatccctaagataagcaagtgccagtacaacgaaatcggaaatgaatagttatattgaattgctagggcgtgacgaatgccaaacaagtttgaaacgacaaagtttgaagcaattgcgccagctaaagcattcatccaaactaatggtgaaaagttatggaatacttcttctaagacaaacaaggcaccactcaaaggagcgccaaaagcggcagacaaaccacttgaagcccctgttgcaagcagaattctagtttttaatttgttctgcttgcatccctgagcaacaccttgaccaattgtcgagcccagctgcaatgatggtccttctggtcctaggaatagccctgtgccgataaccaagataccaccgattaatttccgccataaaattggaaaccattgtagtgatagcttcccttgcagttgcaattttacttctggaataccagaaccaccaacatggggatattgtttaacaaaataaccagcaattaccgctaccgcaataaagccaatgataatcgcaataaaccacaacggattctggtgcgctaattgaaacaagtataaccaaaaaccagatgtcttttcgattccaaatctaaataaaccaactactacgccggtacatattccgacaagtagtgcttggagcaacagtttaatattagttctgtttgcctcgtctttcattactttctccctcacaataaaaaaaacgtgtcacaaactattgtacaacaaaaagccagctagaaatgttccaatgtcattaagttaagacattgacaattaagggtgcttttttagagatcgaatcatttggattcgatctctttttttgtataaaataaaggcgaaaagaccagccttttcgcctatcttatatattatatattttaaaccttcaaaattattgccagaaagatggtgttaattatgaaagcccttcataagaatattctagaacgtcttgatcaaattatcaataatactggggatcatattcacgattttattaataatcctcatgcttttaccaggaaacgcactttagatgcagcgacagtccttaaaactacaattaacatgcaaggtcagaatttaaacagtgaactctttagagcttttggcgaagatgcaactaaaaagaacgataaagtagttagtacttctgcctatgttcaacgcaaaagccagctttctcctgcttgttttaaacatattctgactgtttttaatcaaaatctatttaatattcaactttttgatcatcactaccgtttgtttgccattgatggctctgactttaatcaaatctggaatccgaaatcgaataacattgtacaagcttcttctcataaaaagaaaccctattgtcaaattcacgttaatgccttatatgatctattgaataatacctaccaggattgtatttttcagcctaaatcagaaatggatgaacgcaaagcggctgttcaaatgcttaaagctttgaattgtggtccatatattgtaacaatggatcgtggctacactagtttcaatatgattgaaaactgcaatcgcctgcctaactgtcattacataatacgaactaaggctggacaaggcggagttaaagaaataacgacattgcctgatcaagaatgtgatcgtgagatttcctgcctggtaactacttctaactattactacatcacgcataaagccagtgagaatattcaccatgtccagcatcattatcgccaatatattaagtatcgctctaaaaatacccaggatctaagctgggattttggcgagttatgcacaataaaatttcgagcctgcaaatttagaattaatgatgccaaatcaggcaaagaagaatgggaagttgtgctaaccaatcttgatcgaaaaaattatccgctaaaaagaattaaagagctttatcatctgcgttggggtattgagacctccttcaagaaattgaagtattctttaggcagtgtacagttccattccaaacaagataaatttattgaaatggaaatttatgcccatatgattatgtttaatgcaatcagtcaaattgatgcacaggcctatattccgcaaaagcattgcaagtatcaatatgccatcaatttcaagcaatcatgcttgattattcagagcatgtatttggcttcttctttaacgcaagattttgaacggatccttattcagatcagctattataccattccaattagaccaggccgcaaggacaagagaaatattaagcccaaatcagctgtatattatttatatcgcgtagcttaaaaaagcagaatctgtgctatgccttatttgttgtacgaaaaaagcaccaatttaaccaattaaatgttaaatcagtgctttaaaagtctaatattaattgtcaatgtcttaacttaatgacattggaaatgttctaactgacttttttgtttcatgtgaaactaattatttttcttcataccattcggtgtggaagacgccttcacgatcatttctaaggtaagtgtgcgcaccgaagtagtcacgttggccttggatcatattagctggcaagtttggattaaagattgattccaaccagttaagagctgcgctcaaagttggagttggcacaccacacttagtagcaaattcaactgacttacgcaaagctggcaagttttccttcatcaaaccgcggaaataatcgtcttggaataggttcattagcttgccgttcttgtcataggctttttcaatatccttaagcattgcggaacgaatgatacaacctgcttcccaatcttgagcaattgacttgtatcttaagtcccaatcataagcttcagcagccattgtcaattgttggaaaccttgagcataggcaacagcttgggctaattgcaatgatttttcgaatacgtcaaccatatcatcaggaatttcaccattgtattcaaacttagttggtttaacgcccttttcaattgtcaagtgtgcttgcttactcatgaaacgtgccattacagcctcggctaccaccgttacaggagcgccaagtgcaacaccatcttcgagcatccagttaccagtacctttgtatgaagcaacgttcaaaatgtgatcgattacgtgatctggcgttaaatcatctttttgtgccaaaacctttgaagtgatttcgctaagatatgcttctaccttaccatgattccatttatcaaaaatttctgacatttcatcatcgctcttgtgagcaacgtcacggagtaagttgtaaacttctgaaaattcctgcataataccgtattcgataccattgtgcaccattttgacatagtgaccagcaccttcaggtcccatgtagtagacacatggcttgccttcagtattcttagcggcaatagcttcaagaattggagcaacttccttataggctggttcatcaccacctggcatcaaagctggaccattcaaggcaccctcttcaccaccggaaacacccataccaataaaatgaatgccgtgcttttccatttcgtggaaacgacggttagtatcgtgataatttgagttaccaccatcgattaaaatatcgcctttatccaaaagcggcagcaatttttgcaaagtttggtccactggatcgcctgccataatttgaatcaaaatcttgcgtggcttttcaagtgagtttacgaactcttcccaggtgtagcaaggctttaatttatcatcttcatattttgcgaaagcatcaacttctggtttgtcgattgagaaaccggaaacggagaagccgtggtttctaacattcaaagcaaggttcttgcccataacagacaaaccgataacgccgaattgttgcatgtttattaattcctccattaatcaaagttcatcaagtattattatacgttctagcacgcaaaaaagcgaaaccaaaaggttccgctttttaaaatctagttaataatttttttgttattgggtaaaggtgtttcacacactgctcggtaatatttcctaggaaatattacttttattgatcaataccccaaagtaaaatgttaaatgctaatggtaatgttagcttggtaatgtatccatcctttttagcctgttttaaagatgctagaacaaatttacgttgttgacccgttagctttttggctactttaacagctaaattaaagtcatactcgttttttctaatagcatttttgataactatctttgcccacagaaataggttgagaatcggagtttacagttacaatgtagctccacttgctaagtcgaggaatatttttaattgttatagctttatcaaacttagctactgcagttgaattgctgttgtctgcagcgttggcagtgacagacgatgctgaaaataatgctgcaagtaaagcagtagcaagtaaactaattagagcttttttagatttcataatttagcatctttttacacatagtgcttattggctaataagcattaattcatatccaacactgtctattataagcatctgtattctatttactagccaacaaactattttatatttaaaatcgtatataaaatgaggctatttcccaggaaatattttcccatacaaaaaaagcgggacaaacgtctcgcttctttataattactcaaccaaattagtgttgtgaagcacctgaaaccgtatcaggagcaggatcctcttctggttctgattcttcatgttgagatgcacctgttgcagcgtcagcttctaagccgtacttttctgcaaagtaactgaatggcttcaagtcttcagcttgatacttcttgacaaaggctgggtcgtcaagtgagttcaactcagttgagtaaggcatttcgtgagtgtacttgacgtcgatcaacattggaccgtccatcttcttgaattcgtcgacagcatcttcgaattccttcttggtgcgaaccgttacacccttaacattcataccttcagcaacctttgcccagtcgttatcagggataataacaccagataatggttggtgagattcatcttcttgttctgcttgaatgtaacctagtgtttcgttagtaaatacaatattcaaaacatgcatgttgtaacgagccatagtaagaagttcttggttcatcatagcaaaaccaccgtcaccagctaattgccatacttcacggtctgggtaaacagttgctgcagtaagagcagctggagcaccataacccatagttgcgtgcaagcctgaagtagtccacttttgatcatcatgcaagttcaaaagacggcatgagtcaacgttaacgttaccaacatcaatagcaaagatggcgttgtcatcagccttcttgttgataacatcccagattggttcaggacgtacaggcatttcatctgagttcttaaagcttgcttgccatgcatcccagttctcacggtctgcaatagcagccttgtaaagtggtgattcgctacgttcttcaccagcgtcaataattgctctcaaagccttcttagcatctgcaagcattgaaacatcagttgagtgacgcttaccaaacttagctgaatcaacatcaatttggataaccttagcgttcttagggaaccataaaactgagaatggtgagttgttacctacccaaacaactaagtcagttgcgctttggacttcttgagcagccttaggtccgatacggccgatagtacccatgtatgctgggaatttgtcttctactacacccttgcctaagtatgatgacataataggggtcttgaacttttcagcaaattccttaacttcttcaccagcatcctttgcacctaaaccaatgtacatggttgggttcttagcttctttcaaaagcttaacagcttcttcaactgaagccttagttggtgctggataattgtctgctggatgagcatccttgtttacacggaaggtgtcatcaatcttttgccaaccgtagtccttaggaataatgataactgcaggaccctttcttgcgtaggcttgacggatagcttcatcagttaaaattggaatttgttcagcggtcttagcttggcggcaccaaacactagcgttcaagaaccacttgtcttcatcaaaagcttggaagaagtcaatatcttgacggctagttggaacgttagcaacaattgctaccattggagtcttgtcaaacttagcatcatacaaaccattgaataagtgggcagcaccaggaccagctgaaccgaaacatacacccaacttaccagttaacttatattctgcagaagcagctaaagcaccagcttcttcgtgacgtacttcaataaatttcatcttatctctaaagtcatagatagcgttcatacttgagtcgaatgaaccacctgggaaaccgtagatatgatcaattccccaatcgtaaataactttaagcattgcatcagaaccattaatttttgtcatataagtgcatctccttaacttttgttctttcataatgtattaaaacactttttttcacatttgcaaaccgataaaatcaccgttattacgcaaatgaaaacgcttttgtaataataatcacttcacaagctttaccaaattcaatatctcaaaaagctgaatggtagcgttttatattgtgatttgatgaacattattatactaaatttcacttattttatgtatattcattgttacttatagtaaaaatttaagaaaaaattttttacaatttatttcatagctatccaatttagaaaaacgttattttataattttgcgcataaaaataacgtagaatactattcctacgctatttttgtgctattctactttttcactctagagtaacgcccattttgaatgtaaacactcaagattgccaagtcagctgggttaactcctgaaattcgttctgcttgagctaaagtttcaggacgaattttttcaaatttttgccgtgcctcagtagctaaaccttcgatttggtcataatcaatatctgctgggatttttttggcttcttgtctctttaagcgagcaattctggtttcttctttcttgatatagccagcatacttgataccaatctcaacttgttctttaacgtaacgatcgcctggaactttttcaccagttaaccgttcaatatcagcaatagtaacattagggcgacgcaagaaaacatcggccttaacaccggccttcattggttcctgaccaatactttgcaaaaattcctgcacctcatcagttaaatgaaccgtaatttcatgcagtctcgtctttgcatcttcaatcgcatgcttcttttcttcaaatcgtgcgaagcgttcgtcagaaattaagcccagatcatgaccatattcagtcaaacgcaagtctgcgttatcattgcgtaaaatcaaacgatattctgctctactagtaagtagacgatatggttcattcgtccctttggttaccaagtcatcgattaacacgccaatgtaagcatcgttacggcctaaggtaaatcctggcttatcttgagcagataatgccgcattaattcctgcaattaaaccttgaccagctgcttcttcataacctgatgttccattcatctggcctgcagtaaataaatgctttacgtttttggtttccaaagtatgcttcaattgccatggttcaaccacatcgtattcaattgcatatcctggtcgcatcatttccgcatgttctaatcccgcaacagaatgaatcatctttaattgaatttcttctggcattgaagttgaaaagtcgcctacataaacttccttggtagtctttccttctggttcaaggaaaatttggtggcgatccttatctgcaaagcggacaactttgtcttcaattgaaggacaataacgtgggcctacacccttgataattccagagaacatcggtgcacggtcaagattgtttctaataatcgtgtgtgtggttggattagtataagtcatccaacaagaaatttgtttttgtaaataatcttcatcacgactttcatatgaaaagtgccgtgggattttatcaccaggttcttcctcagttttagaatagtcaattgtattgccgttaacacgtggaggagtaccggttttaaaacgacgcagcttaaaacctaacttttctagattttccgacagcttaattgaaggagtagtgttatttggacctgaagaataagtcaattccccaataataattttaccgcgagccgctgtacctgtagtcaaaacaacgcttttagcatgatacttcgcaccagtattggtaatcacacctttgcagacgccatcttcaactaccaattcatccacgatagcctgacgcaaggtcaagttgggcgtattttcgatcgtatccttcatgtgttcatgatattgccacttatcagcttgagcacgtagcgcacgcacagctggccccttacccgtatttaacatccgcatttggatataggtagcatcaatgttctttcccatttgaccacctaaagcatcaatctcacggacaactgtccctttagctggtccaccaacagatggattacatggcataaaggccaccatatccaaaccaatcgtaaccagcaaagttttttgtcccatgtgggcacttgccaacgcagcttcacatccagcatgcccagcaccgacaacgattacatcatattcatttgaatcatatgttttaaccattttcatcctactttcctaaacagaattgactaaataattgcgtgattaattcatctggggcactttcaccagtgatttcacctaaagtatcccaagcaccagtaaaatcaatttgtgcaatatcaacagggacgccatcttcaactgcttgaattacatcttccaattctttcttagccttatgcaataaggaagcttggcgttgattggttaccataatttgatcattagaattttcaatcccagcaaaaaatagcttattaatcaattcttcaagcgcatctaagttttgttctttcaaaatcgaagttgaaataacatcactacccgttagtttctccatctcagtagttgttattttttgacctaaatccgacttatttaagatcacgattcgcttcttgtcctttgttgcttcaattaaggcttgatcttcagctgttaatgcttgactagcatcgattaacaacaagaccagatctgctcgctccaaggccttttttgatctttctacaccaattttttccaccttatcttcagtgtggtggattccagcagtatcaattagctctagcggtactccttttacagacacatattcttctaacgtatcacgcgttgttccagccacatcggtcacaatcgctttgtcgctttgagtcagataattcaataaagaagactttcccacattaggacgaccaacaattgcagtagccaaaccattgcgcaagatttttccttcttgtgctgtcttcaataagcgattaattttatcaattactgatctagatgtgtctgccatctgttttgcggtaacagtatctgcatcatactctggataatcgatattaacctcaacgttagccaaagtattcagaatttcctgccgcattgcctgaatcttgtgtaacaatccaccagctaattgaccaacagccacttgtcgtgccttatccgtcttggcccgaacgatatccatcacactctcagcttgagttaagtcaattcgtccgttcacaaaagcacgtttagtaaattcaccaggatcagccattcgcgcaccgtgactcagcaacaattgtaaaatatgattagttaccacgattccgccatggcaattgatttctacaatatcttcacgtgtaaaggtcttgggcgcacgcagcactgtcaccattgcttcatcaatcgttttcccagtatccggatcgataatatgaccatagtgaatagtatgtgtcggcaccttgcttagatcttcgcctttaaaaacctcatcagcaatcttaattgcatcctcaccagacattcttacgattgaaattccgccttcaccgatgggggttgaaattgctgcaatagtatcgaactctgtcaaagtttgagccataattcttcccttttctcaataaaaaaagcgcattataccaccacgaataaccatgatggataaagcactttgactactttatctaaaaatcattttagactaatattcttttatttctttttgcgtcctaaacgcttgtaagcccttcttagtttacgtttgcgttcacgctcagcctcagcctttgcttcttgctctcttctatatttaatagggttttgcaagataaaggtttgaagcgcctggaacaagttggaaattacccagtaaagtgtaatagctgactggaagtttaaggccatcacaccaaccatgatagacattccgtacatcattactttggtcattccattttgcgatgattttggcgtcgataattgactaatatacgtcgataagaacgtaaagatcattgctaaaataggcatgatgtaatatggatcgggcttgcttaaatccatccataagaagcgcccagtttgtaactgcggtgtacgtaaaatcgcaccatacagtgcatacataactggcaactggatcaggacaggcaaacatccagtataaggatttacgcctgcttctttataaagcttgttagtttcttgttgtaataatgttcttgattcagtgtcacgtcctggatatttcttacgcaactcattaatttgtggttgaatgctttgcatcttagtagtacttcgaattgaaatagcattcaaaggtactaagatgacacgaacaatgacggtgaagacaataattgcccagccataactgttccccattaacttagctagccccaaaataaaagctgacatgtaataaacgatccaacggtcccaccaattaccacttgtatgtgagattggcgttgcttgaccatttgctcccgtagtagcacatcctgtcaatacaacagcaagtattgctactgctaagactgcaagaagacgtttgacatttctcttggtcagaatgtccttcaatctatttttcctcaactttatctggcatttcttcaataatatgagctaacgataatgcgtgaagcaagtttttacgcacctgagccatattaaaatcgcgagcataaggtcgcgtaatgattaaaaaatcaacatgcggattaatctgcaatttttcttcatcaatcacggcccgaatataacgcttgagtcgattacgtgcgactgcggtatgaccaacctttttgcccacagaaattcctactcgaaagtgtttattttctgttttttctaccttataaatgacaaaagctcggttagcgactgagtcgccagattcgaaaacttgctggaaatctttttcagattttactcgataagactttctcaaaacgtttcattccactctagtagactaaaaaaaccactgggattcagtggtttaagcagataagacttttctaccttttgcacggcgtcttgctaaaaccttacggccatttgatgtgctcatacgcttcataaaaccgtgaacacgtgaacggtgacgcttcttaggttggtaagttctcttagttgtcatattaaactgcacctccataaatttttgtgccaattgcacaatgtcttattaaggatagcacgaaaagccataaaaaccaagtattttaagaaaaaaagacttttaaatcccgtgaatattttctaaaaattcattgtttttcatgtggataaaaaataaaatatttttcttacgtataatttccacaagataattcccaacgttttccacaactcacatggtgttaaaaacttaattcacaccatgtggataacgcatatggtattttacctcaagtattgatagaatagtatccataattcacagctgtactgtgcataaattaacggttttgctcttatcatgtcaaaatgtgcatatcgctttaatagttgtcaacaggctgtgtgctttgttgatttctttttcacctgtggaaaaccagttaagtaaatggtaaaataaatttgctttttactaactgggggaatgtaca
